United States Patent Application Publication US 2022/0211063 A1 - sequence listing, part 49

SEQ ID NO: 152 - DNA, 7752678 bp, Penicillium roqueforti (residues 1,938,171-3,876,340 of 7,752,678)
  misc_feature (471)..(2988): n is a, c, g, or t
  misc_feature (125068)..(125241): n is a, c, g, or t
  misc_feature (177028)..(177803): n is a, c, g, or t
  misc_feature (384131)..(384321): n is a, c, g, or t
  misc_feature (555862)..(555887): n is a, c, g, or t
  misc_feature (601276)..(601376): n is a, c, g, or t
  misc_feature (676767)..(677111): n is a, c, g, or t
  misc_feature (719510)..(719709): n is a, c, g, or t
  misc_feature (1142758)..(1142975): n is a, c, g, or t
  misc_feature (1186306)..(1186928): n is a, c, g, or t
  misc_feature (1335789)..(1335960): n is a, c, g, or t
  misc_feature (1623890)..(1624078): n is a, c, g, or t
  misc_feature (1638029)..(1638196): n is a, c, g, or t
  misc_feature (1653209)..(1653330): n is a, c, g, or t
  misc_feature (1825533)..(1825713): n is a, c, g, or t
  misc_feature (2226335)..(2226483): n is a, c, g, or t
  misc_feature (2393326)..(2393492): n is a, c, g, or t
  misc_feature (2448029)..(2448167): n is a, c, g, or t
  misc_feature (2535304)..(2535417): n is a, c, g, or t
  misc_feature (2536977)..(2537199): n is a, c, g, or t
  misc_feature (2854122)..(2854160): n is a, c, g, or t
  misc_feature (2984525)..(2984774): n is a, c, g, or t
  misc_feature (3020827)..(3020986): n is a, c, g, or t
  misc_feature (3033663)..(3034040): n is a, c, g, or t
  misc_feature (3159256)..(3159377): n is a, c, g, or t
  misc_feature (3215490)..(3215755): n is a, c, g, or t
  misc_feature (3224550)..(3224852): n is a, c, g, or t
  misc_feature (3317434)..(3317714): n is a, c, g, or t
  misc_feature (3542082)..(3542257): n is a, c, g, or t
  misc_feature (3623089)..(3671588): n is a, c, g, or t
  misc_feature (3674128)..(3676164): n is a, c, g, or t
  misc_feature (3690938)..(3691172): n is a, c, g, or t
  misc_feature (3731683)..(3731941): n is a, c, g, or t
  misc_feature (3989065)..(3989240): n is a, c, g, or t
  misc_feature (3992024)..(3992135): n is a, c, g, or t
  misc_feature (4101379)..(4101816): n is a, c, g, or t
  misc_feature (4338959)..(4339088): n is a, c, g, or t
  misc_feature (4339466)..(4339770): n is a, c, g, or t
  misc_feature (4384133)..(4384295): n is a, c, g, or t
  misc_feature (4533774)..(4534000): n is a, c, g, or t
  misc_feature (4697051)..(4697221): n is a, c, g, or t
  misc_feature (4793842)..(4796557): n is a, c, g, or t
  misc_feature (4802159)..(4802531): n is a, c, g, or t
  misc_feature (5082424)..(5082567): n is a, c, g, or t
  misc_feature (5096606)..(5096762): n is a, c, g, or t
  misc_feature (5239354)..(5239492): n is a, c, g, or t
  misc_feature (5277707)..(5277891): n is a, c, g, or t
  misc_feature (5381105)..(5381304): n is a, c, g, or t
  misc_feature (5479285)..(5479716): n is a, c, g, or t
  misc_feature (5512271)..(5512467): n is a, c, g, or t
  misc_feature (5631202)..(5631289): n is a, c, g, or t
  misc_feature (5721684)..(5721908): n is a, c, g, or t
  misc_feature (5728801)..(5728946): n is a, c, g, or t
  misc_feature (5773994)..(5774083): n is a, c, g, or t
  misc_feature (5808460)..(5808504): n is a, c, g, or t
  misc_feature (5832936)..(5833053): n is a, c, g, or t
  misc_feature (5846493)..(5846684): n is a, c, g, or t
  misc_feature (5859621)..(5864342): n is a, c, g, or t
  misc_feature (5865323)..(5948322): n is a, c, g, or t
  misc_feature (5948903)..(5949337): n is a, c, g, or t
  misc_feature (6008391)..(6008479): n is a, c, g, or t
  misc_feature (6324361)..(6325082): n is a, c, g, or t
  misc_feature (6373211)..(6373571): n is a, c, g, or t
  misc_feature (6805550)..(6805552): n is a, c, g, or t
  misc_feature (6846983)..(6847998): n is a, c, g, or t
  misc_feature (6999682)..(6999814): n is a, c, g, or t
  misc_feature (7043444)..(7047251): n is a, c, g, or t
  misc_feature (7056989)..(7057494): n is a, c, g, or t
  misc_feature (7108394)..(7109165): n is a, c, g, or t
  misc_feature (7114302)..(7114990): n is a, c, g, or t
  misc_feature (7152080)..(7152275): n is a, c, g, or t
  misc_feature (7347407)..(7347513): n is a, c, g, or t
  misc_feature (7355670)..(7355674): n is a, c, g, or t
  misc_feature (7379152)..(7379426): n is a, c, g, or t
  misc_feature (7441573)..(7441798): n is a, c, g, or t
  misc_feature (7524923)..(7525042): n is a, c, g, or t
  misc_feature (7750535)..(7752448): n is a, c, g, or t
gtcctccgaccgaacctcctttccgtatacaaggacgaagaaaccacccgcctccgagtctccattcccctgtctgaagtgaccgctgtcgcgcccgtcaagtctccccgatcgacccggcggcatgttttcggtgtctttaccccatctacgaattaccgcttcgaagccctgagcgaacgcgatgcagaggactggatcgaccgcattcgtgccgagaccccccgcgacgaggacgagcgagctttcctggctttgaccaaaaagcacgatccccctgccatccagaaacagctcgtcgacgagacaaccgatcactccgacttcgatcacactggccgcgccagctctccggagccacgccatccgctgtccccacgcagtaaaaatgcccagaaactcccttacatccaggattactccggcaacgagatggcatcgcattcagagttctctgatggacctgcgccatcacgtaacatctacctacgatccatgccctccatccattcactgtccgtttcagcactggaggataaatcggcaccccggccgtcatcgtctctaccccgagataccagcaaacaaacagactcgggcactttgcgtgacccagagcgggtaatctgtcaggggtacctgcaggggctgcgcatacaaggaaccgtgcgtcagtggaaacggctctgggttgtgcttcgacctaagagtttggccttttacaaggatgaatcggagtatgctgcagtcaagatcatccccatgtctcatgtatttgatgccgcagaagtggaccctttgtcgagatcgaagacgttctgcttgcagatcatcgccgaagaaaagacctatcgactttgcgccccggatgaagagtccctggcgcgctggctgggctcattgaaaagcattctggccgcgcgcaggcgattggagccgtctatggccacttctgtataatgccactcgctctacggagtagggcttgttttattactctacctattcctactcccttccttcacctcatcttccctgcatctcaggaaccctctctcattatttcttatcttttaactcttttctttcaatatacccaggttggtgatctcgttttgactgctcgtctcgcggtgagctccggagtcttcgaataacggattggcgttagtaccttcgtgctcattgagcaccctgtttttttctaccttcatttctccaactgtctattgatttcattcattgacacgatgtattctcattgcatccatgcttctctctcactgtggcatcctcccttttccgtcgtccgtcttcttccatttcagtgtctatattgagtacctattatgtatcatattgcttcaggctgtactacgctagtgcataatatataatactctatcaggataccatcattcaagtttggtgttaaccgttcggtgtaatttttcgaatgtcacagatatggcgctaatgtatgacttatattacagagggtcaaaccaagcttttggtcggccttggctgagacccctcaattttagatgtgagaaatcaaattcgtgactctttttggagttgactagactcggcaaatcatccgtctacaattgggttacaaatttcgatttcgtggagaggtggactgaaatgcaggcagaagtagagccaatgagaatgctgaatgacgctacacataatctatatcttgggaataccaacctggagaataaactaaatgctatgtgagcaatacaagaaatgtgtagcaatgaatacaagaaccctcccatgaccaaactaacgcatttcctcttcttcaacgggaatactgttatactcacccgagaaggtcctgcctgcatcagtggtgaggtcgtcctcaggcttactctcgtgttgcacaaccaagaatgacaagaacacaatagcggctccaacccagtacagagggctggagtattgtgactgtaggaccatctgtccaatcagggagagcgggatggtcatactaagcccgactgtcacgataagcggggtggtgaggagcatggagtaagcccaagcaatgtcggagacaaatgatgcaaacgcgttggtctgatagacgtgaggttagaatcaaaggtgagcaacaggagtcggagccataccagaatgattgaccacactcgcgacgtctcgggtaaggagaagggctcaagccccgtccagtgcatgatgaagaaaccaggccacagaaagatgatgttgaaaaatccaaccaggccgaagaagagtggcatgtttacccgggattcgtcgccaacttgtttcttcatcacgacggtataaagaccgtacaagatggcactgaacgctgccatggcatcgccaagggcaatctcccctgaggatttgtgtgggaatgaaccctcgccactatctgcgccctcgcctgtttctggcttggagagatctacgcgcgaaatcaggataatgccaatcagagaagccaagacacccattaatttgcgcatcgtgaatttctcaacacgcagcagggcgccgaagaccatagtccatacacctagaagagtgagggtgagaacctggtctttacacatctaaacgggggaatcttaccactggtggaagtcagaatggttgtgcttgcaactgacgtgaattgaagacatcccatggcgaagtaatttgcctatccaagaaatctcgattagttcccttccaacacataagcttccatatcgtgaggtgtatgacatacagtaaactatgataggttagccagctgatcatctatctaagcctcaaggtcattgtgcttacccagagcagacaaaactgaatactgagtttagctgtcgctttaagccctagctttccgcttgaaggatcctgtctcccccgcgagaattgcccgtcctcttcatctgagccgctgcgtagtatcctctcctcctcggccttcgggtcatgcgaatccaaatggttcaaaaagctcctcaatgatgtgatctgagaaagtttcccgtgacgccagagagcccatgttcgacgagcgacgatgagaatgagaggcatcataaacatggaggtattcgtgtaagttacgaagaaagggttcgggtatgttttgtcggcgaagatagtctggatgtcatttcatgggtaattagccaaatgtttgtatcaatgtatgtattttgcgttacgaggttatgatttctcaggaagggatgcgcatacacttccaaggaaattcgaggttgtccacagcacaaccaccactaggagcaggatgattcctaatgttcgccgcgccatccccagtggcatcgtgccaggtgcttcgtgtgtggtcaaggtcatggttgtttaagttgttttagttgcctgtgagagggttgaatctgcgcgactcgtcgaggcgtaatactggtgaagaacctcgtgccgccgatgtcgcaatcgctacgtttgcagccgaggatgccgagttggacgggatatcagtcggaccgctgtcatctgaacatctgaagcgtaatgagcaaagatctctgtgcagaagcaaatgagtgtcacgagacttcctgcctaaatatatgcgctgaagagaacacggggttatgccaagcattcgcaagataagggtccgggtggggagaaatgtagtcgccgatattatttcggtactccgtacggagtacatttatttgtagtaattaaccacgagctacatcagcctacatgtgataaataccctgatggctatcataagaagtaacctgccctggtgactacggatcatctgatggtactagatttacttcgagggagtatgcgatcaactgcctattacggaaaaatgaaggaatcgcattaagcctaacaaagacattgtctgcataaaactgacccgagaaagggttgagtaagaagtttctctctgaggtgaatttcacaatgaaaccaagacatctacaagacaccgggggaatggcaaggtgatccaaaacaaaccccgtggtcttctttacagactcaggaccggagaccaaccaaatagtagtaggaaaaaaggaaagacagaggaaataggtcgctggaacatcatagcaattggaagggtatatcaacaggcacagccatcacggtcattgtccagatggatgttgattgggtcgctgaattcaccgctgaattcctcagcctcttcctgggcaagtgcactccgcgcgataactaaatagtgattagaaatgtcgggaaagaacagtttttgagaaaagtagctagggaatttgactcaccttcaaacgcctgctcgacgttgacagcttccttggcactggtctcgaagtagggaatgttacccttcgactggcagaaagtcatggcccgttttgaggagatcatacgcttgttctcctctacatcgatcttgttaccgataacaacctgctcatgactattagcacggaccaacatatcattttgcctgctgctgcggcgcatgagataaggaaaagaaatgcaggaacaccacttacgaatgggaaactctctgggtccctcgggcttgcctggatcaagaactcatctcgccagctgtcgagagcctcgaaactcttggagttgttcacatcataaaccaagacacagcagtcggctccacgatagaaggcgactcccaacgactggaaccgttcttggcccgcagtatcccaaatctgacacctcaaagttagttactgcccctcatcacgagattgtgctaaagtctctagcgccttacctgcattgtcacgagtcggtcgtcaacgagaacctcctttgtgaggaaatctgctccgattgtggccttgtagcttccactgaacttcttattgacctattcagctcataaaattgcatgttagcggttataggtcttcggggccgaccgcggtacggccataggctagtttgggacgagattgaacggacatattggttcatcaaacttgtttttcccacaccactgtcaccaaggataataacctagatttcaaagacgccagttagcaaaaaaaacccccacatattgaaagattcagtgcccgtcacacggatcagatgcggggattgtaccttgaggaggaccttcttccttgacgccatggttggggattggccaagtgaccaagtgtaaatgtgcgaggaataaccgtaagttcactattaagcaaagacctataagcagtcttcactaagcctttatagaacagataaggacaagttagttggagagttggggtcgggttgcagccggattcgatgatgcatgaggagagctgggcggtggagcgggcggtgggcaagtgataacgattagcacatctgactccccaagcggcaaccaactccacttcatcactttcaggtacatttgcttggaaggcttatggcccactggagggaggattacttggctgccctgacagtgcgagaccaacgagagaaagcaaatgctactctctatgatgcctgtcagtctatcattgatgctttttgttgagtgattgcgactgacatcatttaccaaatctagatgcccagcttgcagatcgcaccagcaaattagcagcagcagcaaaacttaccagtcctgcaatagcgcagagtgaagctcaacccactgtcccatctcctatagttgcaccatccaaaaggcaacgatcgactgagccagactataccccgactgatcttctcaatactacccgtgcagacctttccgaggcacagcgatcccgctcggaattacaagatcgcttgaatcgggtgaacacagaagcagaaacacttcgcaagaagagttcacaagaggctcgacgaataaacgccttggaaagcgagagggcgcatctcaagctacgattggcagacagagatgcggagctaaaagggaaagccaagctgctagaggtaggctgtttgatattcacataggctttctaatcacgcaagggtgagtgagggaaagtggctgacatacttgtgcgcatctctgcaggatttccaagatgaactggcgacgctaaaccttcagcttaatatggcagaagaacgatcaactcgacttaaaaatgaaaacaaagacctagttgatcgttggatggccagaatgggtcaagaagccgaggctatgaacgatgcatcgaagtattcctgactagtcctaatgcaccgagcaggtgacagggctaggttgctagaatagaacggagtctagctcctgcggcatttatatattgaatcatgatagccactgcaaaagcgctagatatatatggtcgtgcggctacattaagcttgctcatctttccactgaatgcctgaacagcaggtgctgcacaaagcccgcgcgtggtccatgacttactttcctataatcagtcgaaaatagctagctccctaaccacatcgcccctgtacaactccttgagagcctcgaaaagtcctgataatcccaccaagttgcatacgataagccgcatagctagtgcctatgtcccgcgataatctaatactgtcctcttagattgcctgtcaattaccaacattccattcaatattcatacaccatagcactaaatattgaggaatgagaaggctaaaccaagtatcttactaccagggcctgaacttgaaaggattattcgttttgtacagtcaggttgtcagaaaatggtatcatacaaaaataaacagggaaagtatatccaataacggacaaagtaatgtacaaaagtgccaaaaactaaatgtatgtgccatgcaaaaataccaaactagccattgaagactatggcgtatcatcaatgaaagctttcagccgagagctgtctttagtggcaatgaaatatgtaccaccaacgtcagtccagctcacgttgttcgaccagtaattcttctgctggaccttgaggagattaatcggagagttcaggttgcgagactggattttgtgaccagcgggaacgaaagacttaagtgagacaattttgcagccttctttcatatccaaaaagtggttgatcagctcattgttcagttgtggggtgaaggcctggttgttgataagcaccacgtcagcccgcttcaagacgcttatgatactctcctgctcaagaaagtcacctcggacaagatgagtttttcctggcgcaattccccacagccggcatcgagccttgaactcggattgctgcaaatctgccaaatcacatgcgtttgacatcatctcgcaaccccaactctcacagccaacttcgagtgccgcctgaagaacgacattacctacgcccgagccaagatcaacaaagacttggcccgattttagcttggtttctttgaaaattgtgctgataaagcgggggagaagctctccgtagacgttgtccgtgccgttctcgtattgccggagtgactcgacttgaggggataccgtgcgcgagtaaatttgagtgagaattctttccacccaaggtaaaccaatgccttgtttcgcatccaaatgcttcgcaagactgccgttggtccttaaccgctggatagccttattgtaatcatcgacagcttcccggaattgagtctcggatgttacagccagggcccggcgtaatcggcgcctgatccccgtcgtctcgtcgttgaactgaccagcctcctcgctcgggatgtaattatcgcagaccgtttcgatgacctgaacaatgtcgtcgatgggtcggaatccgtcactttctcgggggactacagagtcatatctggccgaacaataaattagcatatcagtgtccagagatcgatagtctaaccaaacgtacctctcctgctgcgaagcactggggtattgcaggagaatctctttgcgcttgccctcggcgccaaaggcgggcttgaacttgccggacttctgacccgacgttatatccgcggcatgtatcattttaaacgggcgagatccttcttctgagaacgccttcgccgagcggagacgccgctccgggtcgggttcggcgctggcgctagtcctcgcgcgtttgtgcacctcaaacgaggcctcgctgtcgctggcgtcatcgtcgctcgagagtcgttgttcgggtgtcggcctttttcgagtgcgcgagggagtacttaatcgttttgccgagcgtgcttccaggtcactagagaccgatcgagatttcaacgcccgcgccttccggttccgctccgccgaggactggattcgaggtgatcgagtatccgagggttgggtgactgatcgtgtaggagctgcaggtcgagtctgcacaaccttgcgaatttgcgccttctttggctgtagtgagaaggccccggcccctcctttctgaaggtggtcgaaaaagcccatatggatagggatagatagatataaacaaactaatgcagaatggaaatgatgtatgcaaagaatgcaataaaaacgagtcaaacgatataagtataatgcgagcaagaaggaagcgggagaagaaaagaaaagaagcagggcttatcgattaaggcgccactcggggaaaccacgcgatcccgcgttccttggcacttacttggcgcttttgtctatagcctcatttcttctacaggcgtctaaatggatctacatatatgttgttcaaatgttccaaggttaccatctggctatcaaaagtcagattatatatgtaaattatccgattcaaacatttgaactatgaactatggccactctctctatttcttcgactttttctttgccagcctcttctccgcacgaacatccttcttcatacgagcatcgacaatcttgtacttgcccttgacacccttaggacggccagagataccacgattgggacccttggccactacgagcttgacttcctgcttaggcttcttcttggttgccctgctcatcaatctcgcgattgcgccagctttgtcccgctcgctgagagcatcgtcctctgccaaaagcgctgacttcttgcgcagtttctccagtctttgagccgccttgtacttcttgcgtccctgggcttccatcaccttcttgatcgggcgggcattgatggcacgcatcttttctctaatagcatccgcggcagccttggtgatgggacggacaggcctgctgtgcttgccctcgtcgtcgaggaaccattcgggaaggccgtccacgtcgcggaaagcaaatcggttgaagccatcgtcaacaatatcagtcgaccttttttctccagtagccattgcttgcgcaagggccatggcttctgcggtaatgatgtcgatgtctgtaggttgaggaataaatgttagtcctgacgttattcatgtccagcatcaaacttacccagctggccattcgctttgagtggatcttttccttctgtctgttcagcctcgctctcatcggactcgtcgacccagtcagagttcttctttccgttcttcttgttcttttgtttggaggtaggaatataatcctcttcttcctcgtcttcatccatcgcaaagatgttgtcgctttcatcatcttcctcttcctctgcctctttttcttcttcttcttcctcttcctcctcgccctcttctagaccttcgaagatatcttgatcgaagaacatggaggcattgtttgaaagtttcttagcagcaagtgcttgacttgtagtggcagtttcatcatccgaatcctcctcctcctcatcactgctgcctttctctctgtcagaaaagccctcccactcgtccacttcgtattgcttgcgtgtctttttagcacgcaatttcgaatccttgtcctccaggcggccggtgtactgctcgtacatctggtcgagctccctttcaagacggtcctcctcgtcgtcgctctcttcggtttcggactcggattcgttttcattttcactgccgctctcggtaggaagatcacgagcattgacaactgcatctctggcattctcccggtcgacgcgtcgcaaagtgaatgtggtgtcgtcacctcccataccaagctgctccataccaatttccatgggagtggtcatgttcatctgcattcgaatgatatccttgcgcttcttttcattctccttgcgcctttccttcttgcccttggtagtctgctgctctcgcatgcggatcaagtcttcctggatctgtagttcttcgtccataggggccacctcggccacttcttcttcctcgccttcttgggttggcttctttttgatcacaagtccgaacttctctcgacacttgatacgccatctgagcaagttgcggaactcctttttgcctagtaccttcagatcctcacagcaagttcggatctcctctgttgtttcctccaaacgatccagtgtggacaacgcaagatctccacctggcggttgctggaagctaagtttgttgtagccacccaagatagagatagggtcagtagtgttgatgaaatccgtcacggggatctccttgtgttgggtgtaatctccttcttcataaccttcacgcttgcgcttcttcttttctgggttgaaaaccttcgcttcgtagttgggggtgggagcggtaagttcagcaaagacgtgcttcgggtcgaggaacttcgggtcaatgcgctttggggccttgaatccgcggcaaacgacgaaaatttcggcagagacatttcgagacgaaggaggcttggttgcctcgacggaattgaacagctgcttgaagacccacagcagggggttgtaatctttggaccggaagaccttagtaacgaaggttccgccctcgcccaagaaatcagtagccagtctcagggactccaaaaccaattctgcctgggagaaagcatcttgaacccaagcggcaccaacgttgggcgcaccatcgtgaaggacgacatctgctttccagtgtttgatgtgtgatcgaatcgttgcgcgacacttgtccgttgtgatatcgctctggaaagtaatggctcgaggaattggcttgataggggagagatcgacaccaatgataagactttgcgcaggcatgtactctgcagcgacttgacaccatgactgctcggccgttagaaaaaaaaaaaactttggggataaaggtgccattcgaggatacttacaccaggcgcagcgcaaagatcgatacaaactctgcttttctctaagaatccatacttctgattcaattggatcaacttgaatgcggcacgggctctgtaacccttttctttggcaagtcgataccacttatccaaacgaccttttccatgctgcaaatagtcagcacatgaagtgatgcaagctgaggtacggtataacatacctttttctggatcgccattttgaaggaaagctgatctcaatagaccagagaatcctttcgaaaatgaccggagatgtagaacgaatgtatactttttttctatggcagaggatccgagaaaaaaaaagttgcattacttatcgctcaccgcctttgaaccggctctccagattgctgcctgaggccaaagttgcaccaaacatgtgacatgatatcactcaggcacccccggtcacttgtggcgcttggtagaagctttgtcacttgggtttgatcgtctaactatagacctgatgtttttaccctacctccatgacgcccaagggatctcgcaagagagtgaagaccagcccctccggcgtggactcaccggctgaactgagcggtgatggccgagaccgctcagactcccagtcacgggggtacaatgccgtaagctctttgtggctagaatagccagtcctttttgtcatatttactgatcatctatcgtttatatagagctggtatcccggctcctggtcttccattgcgaaagtgtccaaagcagcgccagttaccgaggttgcccgtgaaagcatctcagcagccaaatctgtagcatcgaacgtcacgaactcatcggcttctctccttgatacatcaacaaagaatcgatattcttctattcaacttacgcgaaaagcgggcgcctcgactaggtctctccccgctgacgccaccaccacccgagtcaacattgcgtcggatggttcggcttccactacggctgtcgacgatcccgaaagctccagggccctagaaccggcaaaatccgataaagaaacacccaacgaaagtgatatcaagccgttagaggaaccggccaaggagcagaaggccactcccaacgccgatcccagcacattgcatgcgggatctgcagagggccccgaacaatctagtcgttggctctcatggatatatggaccatcaactacatctaaaggccctacgaatgttccggattcaacgccagccgtggaaaatccgttggccgagaatcaaatggcagagcagagtactcaacctatagtgaaagactatacagcacgggaagaggaacaactggatccggaaccagagcagaccaaagatactgttgaagttaccctcacatcccagaagcgatcgtggcttcagatgtggtatggtacaaatacaccgagccagcaaaataacccaccatctacagaatccacgataaccccatccgcgaattccgattccaccgatacccctgacacaaaaatggcgccgcaagatcccccagatgagccagcagaacgagctggcggatcacagaccccggtcggaaccacgagatcatctggctggtcattctggtccaaagattcaaacaaagatgggtcttccaataaaccgcaggaagccgaagctatcgaggcgtcaatgggaccgaactcgccatcaaaccatacggcgcttgagccagatacagattcaaatatcaagataacccagaaaagcagtatcaaagtcaagcccacgaaagacaaacgtcttaaggttggacccaccactgaaagcactcctgcatctacgccacctgttgaacctcgaccagccgatgttaccgcctcaaaacaattacagcaaattcttcccaaccaagtactaccgaagttcgaagaaacctatgcgtttgagcaatcgccctccattttgcagagcctcgggcgattcctgaattatgggaaaggaacagaggttcggcacgtcagtagggtcaaagatccgcttcatgtgagacacgccttggctattggcgttcatggatatttccccgcccctttcattcgaagtgtactcggacagcccacagggacatccatccggttctccaatatggcagcagacgccatccggaagtacaccgagagccatggctactcttgcgagattgcaaagattgcattggaaggagaaggccgcattacggagcgagtggatctcctatggaagctccttctgaattggatggaggaaatccggaaggctgatttcgttatgttcgcatgtcacagtcaaggtgtgccagtaacaattatgctagttgcaaagttgatacagttcggctgtcttgacgccaaacgagtcggcatctgcgctatggcaggtgtgaaccttggccccttcccggattatcgttctcgatggatcagtgggtctgctggagagctgtttgagtttgcactaccttatagcaaggtctcgaaagagtacgaagctgctctcaaatgtgccctcaattttggtgttcgcatctcttacataggaagtatcgatgaccaacttgtttcactggaggtaagtacataactcgatattcaaacatctatcaaatttctgactagcctccagtcctccctcttctcacctatagcccacccttacgtctaccgcgctgtcttcgttgatggccgagtccacaccccaagcttgtgagcaacttaacttcctcatccacctaatctcgatcgacgatcctaataacaaaacacagcctctctcatctagttggcttcgtcctcaagcttcgcaaccttggtatctcagaccacggtctaatccgagaattaagcaccccactagcaggaagtctatactcaggagagggacattctcggctgtacgacgaggaagccgtttactcgtatgtaacagtcataaatccctacccacaaacaaaactgacattatcttccagcatggccatagaattcgcactcgagacttcttccgtctcagactccgcgctcagcgtcaagcgagccagcagctccgtcacgccaaacccgtacattctccccttcgccatgcgtggtctgctcgaagaggagtatgtgcgtcgagagctgcataatgagacaatggaattgctcaagcaatttgacgactggaaaccttctagtaaggttctgaaggatgtaaagtttagactagaaggtatccggtccaagctctagctaagcttgttagtcgataattagaagtttcttgcttggatggaaatttgatattagcggtttattagatatggaaatacattttcgcttttcttaagtacttgctgccggtctgtatgtaagtacaataataacttccatgtatagcaacagtatatacattcctttctcggttttggtcgatttgtgatggaagttgtctttcatatttgtattatagcggagatgtcaaaaaatgtcgcgattttgttgagcacagaacgagaatgaatagtggagactccagtcgtaagaagaggggaggggatcattataaaaatgcaaatacaggcatgaaagtgccagggaaataaaaaaagaagctcagaacgaccgaagacaaaaccgccctggttaaacagatgcgagtgggaacgccgttttatatgcaccttcgatttcatctagaacaatgttagcgtgagaaccgcataccagaaaaagatacaacaccaacctctcatcccatccaatgcctcgaaagcaagcgaataattcgacaccgccccgatgatccgctctaagccctgccggagttcctcaatgagctggccagtcgaatctccgccttgctcattctcggcggtgtcgggcgcaagctgcttcgccacgcgcgccttatagtagatcatgaacatagcatagctactttgcataagacagcatgcgaaggagggcattgtccggggtaacgaacgaccctgctgctgctgggggtctgagagaggctgcgggacgggcaggttgtggaacatgcgggagatgacgagtgcggcctgtagacagatcttcgcggattgctgcgtgctgtaggggaacccagccgcgaatggatattgcgagtactgaggtgcgtatgagctgatttcggggttgatgtctgatgaggtggaggaatcggatggggtcatgtattccgttgaggttgctcgttcgagagaggttaggtttgaacaggagcaggtgatgttgttgatgccggcgggtttggtgctgacaattgtggtggcgctgtttggatttgctgccgtcaggtcacaatgtctttttatgaaaagggggatgtctgagaaggctcggaagcgatgcgttttgatttgggcactgtagtcattgttagatgggtttagatatgacaaggtgaatagctcgaacctggatagcttgattcgggatattgcgcgtatgctttgggctgtaatggattcgttgtgatcgccgaaatccgaggtctggggcagaagcgggagtagctccgcttgtgcaatcacagactgggtccaggcatcaagttgctgcattctttcgaacatataatacatccctgattgtgacgcgatgcacttgttcagatcaccaatgaactgggttgccgatacaagcacttgttgagcttgtataaagatagcccaaccctgaagaccggttagcggatgaaaaataatgcggagatcttcgagtgcaaacctcggtatctgatgaaaacgatgggtatggagtcgtgaactgcgggtcattgatgacaatagcaggcatctgtttctttattagctgcagttcatgcctgaaaagctaagttactcaccgttgtgctaacaatagatccttgaaccacacaataatactggacaacaattagatcaggaaccaaccaatgaaagaggagagatacaaacagtcatccaccaggctctccgtcgagcttccgaagattcatcgttctccagttgagcatggagtgacttgtccaaggcaattgcaagagcctgaccagcgcgatatcgcatcttgagtaagttaccgcgctgggagtattcataaactgaaagcaccaagagagccaggagactttcataatccaccggagtttgcgaatgaaatctttcccgcccaacaaacggtcgtgcggcagacaatgcctgtccgggatcagtcgaggacagatcaagatcgcactccgcttcgattgttgaatgggcaagttgggcgaaagtatgcgcgtatgttctgcgctggattacagatgctgcggacgacggctcaatatcacttgggtgcggaatcaaagccaagattgcagatattgcaagacttagaggtgaacggggccggtacatcatcatcggttcggatgtattcgagcacggaacagagcagttcaacggtcgatctcggcacggtggcgatgcccgtggcggtagaatggggaaataattatgaatgaagtcataataggcattcaatctggggatattagacaatatctggaacttattgcagagagatacttacatttcaagctcacttccataggtccttacaaaggtttgagcgttgttcgaaggtgatgatatcaggggcacttgcatgtgcgactgactaccatcgccagtgaagaagctctggaacatggagggaatttcggattgaaaatcgagatgcctcaaacctgcgccaggcagagagagttcatcgatttggctgaacatccccggtgctagactttagtgagtatattgcttctttttcggacatgagggcgacgtcataccttcttcaaactccgggggtgaggggacagaattataaagagcatcatcttgcctcgattcttgttctggcgatagggaggacttttccttctttttgcgtggtccgcctcgtttgctgggcaagtaagagcattctctatctttgctaacacactagagtgaatgtcagtccagtccagtccatgcaatgaaaataaacattgatcaacccagatccacaaaaataaaagcgcccaaagcattcaaatcacaaagagtacatacgttcgtgcatggcatctggccgccacatcgtgtcctggaagcccggctgaaataacattagtggagatgttcctctttttttcttcacgggatttgctcaccaaggcagacatgctaccttaactggcggtttggcgaacttcttgcgaactgatcgaggtgctgtcgaggccagtccgttataatcctgaaaagtagcggccatgacgacacctaacataagtacgtcaatctacagaaccatttgaaactgcacctctcggatatcttggcaaccgaatactagttgaaatggggcatttagcttaataaaatcggaagtccgagagggcgttgatatagagacttccgtgtgattgcttgatctaggcaaatcccgagccgtggggaggttcgggatttgctttttggtaactaagcagagaggtcgagtccaaccccaaataggagggtggtgccagaatgcggtgtatatgtagggtaatcgaatgtggatatgtttcttatttcagattcatttttcttttctttctcggtcgaattcaggggatcaaaagagaaagcgaaaacgaaaggcaattttgatattcgaagtatttcggattgaacgttccgatacgaaagatactagcattaactgaccaaactgcaacatgtgactgtaattttaccaaaaacattcgatcacgtggatccacagtggcacgccgatgatgtagggagtaagcgacttaggtaagattatctattattgagaatgatcacttgcaaatacttcaagattaaatttatggagtagttcctgtcgatttcttccaaacaggacgttcggataattcggggactatgcaacggtgtggatcctgaaggtatcgctaagccactcacaatgcgcgcgctactacatacatgatttggaatagttttcatgcgaggcatcgtcgatcgatgctaatcgactattcacggggatgcgcataatccgatccgtaattagacttaagtatgggccttgccttttccaagggggaccttaaggcccacaacatgccgcacactatcccagacactgtcctggaccttcacagggatcttgtgtccctttaagaattggtcgatcaaccacattccaaccacgaattcttcacgcagcaagagtccgttattttggtgatcgaccagatcccatacttgccccaagattgcctctgacaggcggctgcgggaccagatctcccggacgaccagattgagaaccatctccgaggcatgaggtggccatgactcgcttccatcggaatcgggagggatgagaagccctttattagacgcccaaacaccttcgtaccgcttgcgttccctctcggtgacctcggttcgccagcgcttacggtccccctccctgtgtttgtgagggtgtttgtgtagggggtttctatgcttgcgatggtcggcatcagtgggtttcggcatgccgcggagtgtcatcggcatgctcttcggtggacttggtgtcctggacagatcagtcttgtgatgatggtgtgtcaaatgtagaatggctcgtgcccctcgtcgatggggaggaagcggcgggggaggattgggagatggggatgctcgtgatgatgccagggatgaggcgataattgcattggagagggattcctcggtcattccaagagagtcatctattagactggagctactcgtcgtacgtgaatggtttgacatggacgcctcgctcggtgtcgaaggtcgcaggggtgttgtgatgaatccatgatttctgatagaccctcgtggtggaggcacacggggcggaagcctcggttttgactcatcagacggcatagaaggattcagagactctagagaaggatggggactcggtcctcgactatcctgatcatccagtgttgacctggattgttgggatggagagcgcttgtagataggcagatctgagtcggactttaagccactttcgtgcagcatgcgacctaagtagatatctctgtcatgtatcgagcgaagagaggctggtaatggtggcacccggctcgcacttcgtgctgcacttgcgcctgctccaagtctggcggttgtcgacggaacactggtgtctcgcccaggggaccttgacgcagcgagtcgtgccgcaatttgggaggtcgaggtcgaggatagagaggctgctgaagctcgtcccctcaaacttgacaatgtactgactggaggcgaaggtggcttggcccatctcccgattttatcctttacggagcccacttcgggggcgtcggatccagctctctggcgacccagagtatgacggtcacttgccattgcggcagtggcaacagaggatctagggttcacattaggtgagtgatccatagagtgttggaatgcaagcatggcgccttgtaatgcgtcattccgggccacgcccaaccgctggttcgcggaagcggcctcgccatccatggaatcgattccccacagaatccgacaagtaagcgagttatgttgaagggaattatatcaagatcaagataatcaatgatcaggagggtcctgcgatttgtttctgagacgtttaaggggaaatatcgacgggaaatgcacgtgcacgcgaccgtacacgtttcttctacgcgactatatatgttgcatgtataaaatcacatatcacgattaaatccttttcagatactgtatctagatgatttctctattttatcacattcctaacatcactattattactccgtatactctagtgactccgcactgtaaccccagattctaattagccgagccgcaattcattcatccgttctccgctttgcatccttcccctccatctgcaatgtgacttacatgtcagcctggcttggggaaatgttatcttcttctctcaagcccagtcggagccatgtcgggtaaagacaaccccgatgattcccctgttgaaacatatggaaggtccgaagtccgccaagatacagatcagaatgcagacgaattggtcgccggccacacccgatgctcagtttgtagcagtaccttccgacgaccggagcatctgaaacgacatctgcggagtcatacaaaggagaaaccatttgagtgtgtccagtgcggccggcacttttcaaggacgtatgcgcttgggctatagttatccttatgtcgaatcatacactaatcaatccctagtgacaccctccatcgacatgaactgagtcaccatgcaccagggacgggagggaaagaccgcacccaccggattactgtcaaaacattccgagcatgctctagttgcgcaacagccagagtaagatgtagcggcgggacgccatgtggacggtgcgacgctcgctcgctcggatgtcaataccccacgcaaaggcggtccaaagccaaagacatgagagattcagggcaaggagccgatgcgcaaaatgacaatcttaaacccatgcatcaagacttgaattcagcttctagtcagagccaattttctacacaccggcaaaaggagctggcatcatccaaaacttcgctcaatgtaacatctacacccggcagtgatcacaaaagacaaatatcacaagatgcgcacaccattgcaaatgccccgaatcctcgtttccttctcccaaatgagatacgacggccgtctgaaatactgccactgggagcttaccagacgtatgacaactcgagctccgatatcctcaaagcattccctgttaattcatctaacaatctaagctctggaataagtgataaccagccgggtatggacccagcaggtgataattccgaggtaccgctagagtttgatcccacgttctttgaccagtctacgctttccactatcaattggctccctagggagttgcttcctagtgattctaatggctacgcacagtctaccggtgtttcctcgcgatacaaccaatctctcagcccaagcgcctacttatctcggacagaatggcaaccgccaattatcagcgctgagcagctcaatattttgcaaccagagcgagattctcagacaccctctgtccatgtttctctaaggaacaacatggaaaccttgaatcaatattcccacggtattagcgagccttctccgcatacagaatctgtgaattctgctagggggtcagcagactactatgttgatggtgcaccatccagacgccctaagtacgcgccttggtccagcgaatctgtagagccggttgatattggcaggcatttgttggtcgaagatggcgagcacaggttcaacttccctataatttccgaactgcgaacagatcaaatatcggaagatataacccggtgcacacgacggattgaaatctccacctacgatgagatttatcggtactttgttcaactgtgttgcaacgaaactcctttttttgaagtgttcgaatcggagaggtttcccaccgcggatgaatgcaaccagttcatcatcttcttctttgatacatttcaggctgtttatccgatattacatctttctaaatttgaccctaatacaagtcattggctcttgaccttgtcagtaatagcgctcggctgccaggtgtcccacatttccgagatggagcagtgtacaactgctctccgcgagctgattcggcggggtatataccttgaggtgagaaaggtccccttatccccattcaatgctttccagctaattgttctacaccaccagaaagaaaagagtccccctagtcagtcttctcttgagatattacaggctatgttgttcaattgcattggacttcttcatagtaagagcgagagagaaaaggcctcggcattgagcacctttggtgacttggtgatactcatgagaacttcccggttattgacaccgatgcggattaaatttaatgaggcatcccaggatgcagcttgggcttcttggattcaagatgaagtcagaagacgcaccggctattgtatatgggtgagctttgtcgaagaatggagcctttacttttactaacgatgatagcttgtggattgtactcttgcatattactttgatgatagacctctcctctccctagacgacggacaagctgcattgcctgcacatgagaagctatggcaagcatcctccgcagcgacatggaaaccactgtgggcgcagtcatgtggtaactcttattcagaccccaaaaccgaccaatcgctaacttctacagtcaatgaatccttatacgacgcagtccatatcctctatatcgagaagagagtagtgccaggtataggagaattcagtcatattctactcatccacgctctctaccagcgaatgtgggaagtgggagactacttccgccgcccactatccttctggagcccgacagcgaagaagcaatcttgcgagaccgccattcccagcggttcggtatggctcccaggaattccctcatactcgaaatggcgcaatagcgcatgtgactgcctcgacatccttcattggaccgccaacagcaccgcagccaaagctggaggcctcgagcacccaaccatcctccacctccacgttgcccggctattcctactctctccgttccgcgaaatgcgctccctcgcaacctccctggtaacagaaaagcagcactggcgcaaacgacaccagtccctcgagtggcaatacatctggcgctggatgaaacacgaccaatataaagcacggctatcaattatccacgccggcctcacgctctggcatattcgtcgctactcgatgaacgctttccacgagcctgtcgcggctttcatcgccgtgctgacgctgtgggcatacggatcctgtcacccgcatacatcccatgagtccagtccgcgtgcagaactgctccacgaatcgggttttattcagcttgaccggccttgcgatgatgagcttgtgcagattttcgtgcgtgagggtcataaaatgacagtaaacgtcactggtgttggtgatatatgtggaactgagggtccggaaaaggctctacgggttgggtgtgagattctttcgggcttaacggcgtggagtgtttcgaagaagttcatggctatcttgacacggcttgcggatttgagctcttatcattcttcttgggaataacatcgccagcatcagcatgatgctgagcatatctgatttggagcgggatgaacgatgaatttaccaaatatataaacaccttcaatacactagcttttgtattggtcttttggtatgttttatatataaattggagatcggggtgccatgggctagttatatattcctttcttccgatgatggttagcaaaaatagtgacgttaccgccggacaccaatcagttacgcgattcgtaacgggcatcatgaagttgaacgaatcttgaatggtaggataaatgtaggtataaatttggcgaaggcaattgagaactgtgatgatcatcagagtgataacttctttttccgtatagttcgagtggggccatttttatcttatcggcagtgcagcctaaaaacatctggggtagtgcgaccttccgactttcaacttccaacctccgtctcttaatttgcctaaatatggattccgacgagatcctagagcaggatctccacaagccagagaaagaagaagatttggacgaaaagtgagcccataactaactaacggttctgggtagatcactgatagctgttggcagataccccaatagacctcacaaccgggccccgacattgccgttccacgatctgtacctcagtctattcaatccactgagtgaactcaagaagaaaccttcggggcctcctcaagctcgccggaaagttggtccccatggtaaaggtgctacgagtctcaacccgttcgagcgccggcgcgatgtgattgagcgcttcatttcgcggtggcgcaaagaggttggcgacgatatctatcccgcatttcgattgattcttcccgacaaagaccgcgatcgacctatgtacgggatcaaggagaaggctatcgggaagatgctcgtcaaaatcatgaagatcaacaaagaatcagaagatggatacaatcttatgaattggaagcttcccggtcagggcgctacaacacgtatggcgggtgactttgctggaagatgctttgacgttctctcgaagcggcctatgcggaccgagccgggcgacatgacgatcgacgaggtcaatgagaagctggataagctatctgctgccacaaaggaggatgaacaactgcccatattggccgagttctaccggcggatgaacccagaagagcttctgtggctcatccgcattatacttcggcagatgaaggtcggtgccaccgagcgaacactctttgatgtttggcatcccgatgccgagagtctgtacagcatctctagcagcctacgacgtgtgtgctgggagctgcatgatcccaatatccggcttgagggagaggagcgcggtgtcgcgttgatgcaatgcttccagccgcaactggcccaattccagatgcattcatttgagaagattattgctcgtatgaaaccaaccgaagatgacaaggtgttttggattgaggagaaaatggatggtgagcgtatacaactccatatggcgcctgactattcaatcaaaggcggtcggagatttggcttctggtcacgcaaggcgaaagaatatacctacctatatggaaatggcatttatgacgagaatggtgctctcacaaggcatctaaaagatgcttttgtggatggagtacagagcattattctcgatggcgaaatgatcacctgggaccctgaacaggacgccatagttccttttggcaccctcaaaagtgcggcgctggcggaacaacgcaatcctttctcaaatggtccgcggcccttgtttcgtgtcttcgatatcttatatctcaatggacgcgatctaacaaagtatacccttcgtgatcgtcgcaatgcgctagagaaagttatccgacctgtccatcgccgttttgaaattcacccatacgaggaagctactagcactgcagaggttgaagcggctctgcggaaggtcgtcgctgaggcatcagaaggtcttgtgttgaagaacccgcgctctccatatcggctgaacgaacgccacgatgactggatgaaagtcaaaccagactatatgaccgaattcggagagtccctagacgttgttgtgattggtggatactatggctcgggtcgtcgaggaggtgcgctgtctagttttctctgtggactacgagtcgacgacagcacacaagcagcagagaaattctggtccttttgtaaggtgggtggcgggtttactgcagccgactatcaggaggtgcgtcatcatacggatggcaaatggaaggcgtgggatgcgaagaagccaccgaccacctttatcgaactggcgggtggagatgcccagcatgagcgtccagatatgtggatcagaccatccgactcaattgttttgtgtgtgaaagctgcatctgtcgcaattagtgaccaattccgcatgggattgacgttgcgctttcctcgcttcaagaaattgcgcaaggacaaggattggaaaacctcactctcagttcaggagttccttgacctgaagtcaaatgcggagcaggaacaccgggagaaagagttctctgttgatcactctcgaaagaaacgagtgaagagagccactaaaaaaccactcacggttgctgggaacgatgataatgacgaggtccagtatcttgggccttctggacatatcttcgatgagcttaacttctgtatgtgtgctcccttcctatcgtacattatactaatataatggccttctagtcataataaccgagtcgagcgtcccagaaaagaaaacaaaacttcaactggaacaactcgtgaaggctaatggtggcaagatttatcaaaccaagacagccggggtagacactctctgtgttgctgagcgaagtgagcttcattctatatataaaacaagtctaagctaatgtttcagcaggaacggtcaaagtagcttccttacaaaagagtggagagcaagacatcattcgaccatcttggcttatcgactgcgtcaagcaaaatgaaatagatgcaggcctgccggatctccttctcccattcgagccaaggtacgttttgacagccaaaggaggtacacatacaaggggctgataattagcgatttttatagacacatgtttttcatgacggaggataaagaggaagaagtcacagcaaatgtcgacaaattcatggacagctatgctcgcgatacaaccgtcgacgagctcaaggatgtatgacacccctagaaaaaatagcgagcaacaatcatgtctttggctgacaaatgttcaatcttacaggtattcaagcaaatggaacaagaccaagagcagcccgatcatgccccagacccagcaagcgttcggagaatcgaagctctcatccaggaaaaagtaaacgccggctacacggttccatgtggatggctctttcgaggcttgaagtttcatttctactcgagcggggatgagcaagacgaatcagtctccggagaactgagaaaggagcaccaacgcctccagttcgctcacaacacagcccgtttcgcaggcgctgagaactccagctcgttaaagagctcaggtaccacacacgtgatagtcgacccggggactttgtcttcagcggacatatcttctctccggaagtctctggccgaaaagccgggtgcgaaaatgccgcatcttgttagtgtggactgggtggaagaatgctggaaaaatggcaccttgctggacgaggagagtaagttgtaaccctcttcttcatatttatggctttttgggagcgttctaataattgctggcaggattcttggttcggcgatgaatcgtgagagctgagttcgaatcgcatgataaatcatgcatctctttcattttctgatttgctcttttggcccttgagtgtaatatatttttgttcccgttcttttgtagccaggcggcagaccagcagaatatacgtaacggtgaccaccatgcggactgtcgatttatgagctgcttccttgagtgccgacggattcttgcctagccctgtattcattcaacctgtcaagaacactggccccattccataattcttcatctccatcaatcctctttggcattcctacttgctctaatgcaaatgaagctgcaacagacccataacaagccgcctgttctatatcacctcccgtttggaggtacccaatagaatagcctcctagaaacgcgtttccagctccagtcggatcaaccactttagcagcctgctcttctccagtccctgctatgtgaaatgaaggtagccatttggataggttacccgatcgaacaaagcagccattttcaccagctcggataatcacagtaccctttccttccgggccgacaccactggctaggaatttcaaagccagcgtttcaatctcagttctatcaggagtagccggggtatccacaaacaatgcagctagctctaagtggtttggactaaacacgtcgactagggctacaaccgctagacagtcttgaaggttctccggcttgcatgaaaggggagccggttcccagataatcagaggacgatgttgtatacccgcctgctttcgaagagcgagtatgtttagaatgcgcgttctcatatcttggggagtagcaagatagtgatagattttcgaagttagcaaggctgtgcccggcaacttgctttcttgaattgtaagaaccggggtggtgtacttgaaattcttcgctagaagatgactcgaagttagctcatgttaatatgttatgtttgctgatttagtacgcatgaatatagaatttagaattatcggcaagtgaatataaacgggaatagcaagggcgacggaagaagggtaaagggaagggcttttcgcacgtccgaatgtggtatcttgatactccagtaagcctcgagtcgagggctggtctgattcttttgttatcaccaaaattgtatcccagctatgcaagagttctgcaatagggtccggaaagtcatttccaatatggatcggccaagccaaggagcggctcaatggagaaggcaggaacaaccgagcacctagagtcgctaggaaaaagatacaacgatcaggaatccggttgtttcaatcgagacattacaggcaaaaccaaccgtaagctcctgacccacccagcacattgattaaaggtttccggttggcgaagcgaatttcgtcaagcaccaccaagccaaagcttacgaaggaaatatccttggtatccatggggaagatgagcccccaaacctctcaagacaaaattgagttgaagtctttctggggttgagtcatatatttccacttgaatgatctgtacataaacattgaagtgagtcaaataggtgtagttagagggaagccagtccgtaagctcacatgatacaacacgtgagccacgactaaggtaaacaaggaaacgttggaggcgaacgtgatctcaatgctctaaatctgtactagcttggaaatagaagacaatgaccctgttcccacttatcagaggagatcatggggttttcggaaccaatgattgttatcaggctacgtggatgatgtcatgtcgaatgcaagatgagatcacacagtgtgttacaagttgatctaagacatctattaggtacacaatgtctacgtaagtatagccactcaaattccctcgccagtattctagaattattcttaggagcagcattttgatgtaaaggacgaacaagaaccaacacaagcaaggacggagactctcccatagtatgttgtgtgctttacaactaccaggcaagaagctcaatttgtttcaagatttgatttgagttgaatagatatcttaggtagtgatcgaaatatcgatccgagaaaaagaaagaaaaagcagccatagaaaacgcatagcgctgtcaaggtagaaatgggggtatgtaacaaaagaaagaaaatatctgcgccgagcaggacaccgtcctagtccaacgccgcgcttgaggataaccgaaaataagaggaaaagaaaacaaaagatttatgtactgaagtgaagtgtgcccaaaaagggagaagtgtcgtgccataccttgcgctctgcgctaatacagtctgcccaaccctttgtttcaatgggctgagacgcccacccatcgggtcggaacggcgttgttgtcatctccgtcttcgtactgtcccgacaaatgggaattggtcttgcgcgctggcagccagatgcgagcacgggcggggatgtcatcgcggagtttgccgctgcggcgcatgttcatttcgagaaccaccacgcgcaagaaatcgctgttctcacgaatttcgcgctgacgcgacatgggtggattttctgggtcgaaagcgacaaatttctgatccttgctcgcgatgtggaaatggctccgccggttcccgcggccgccggctcggcgatatgtctgcatttggatcgagacggggcacgttttggaggtctgtagcttgtcgaggggatgatcatgatagacatacatctcggccggtgacatcggagtcggattcatcggagatggattcaggtagcggcgtagtgctggagaaggggtttcttgcatcggcaaagggcggcgatcatcggtcatctctggggtgatggtaaaaagagaccgggtaaggaaatcctctgtttggacggaaggggtggcaaatgtcgagaccgactgcgcagcggatttgatggcccgtagagatgctgtgaggtttgacttgaaactagatcccaggcgcccaaatgacgcagatcgccttgcgggtacagcgtcgggtgtggcaggcccattgtcgtttttgatttcgatgtattcgagttcatcgatatcaatttcgtttctaaggagaggatggtctaagtcacactcctcgcaattcgaataccgaggctgtcgtctctcaggtggacttctatggttggaaggggtgggcggcgagagaagactggatggcgatgctaggccatggtctaatgagggtatcgaatcgcttgaggttgatctcactgacggtggtgattcatgttccgaatcgtggcaaggcaggagtttatccggtgggctgagcaggatgtcaagaggggagtaggcggccccatccaggaaactctcttctttcgactcaatatcttcctgcagcatgcgactgaagtcttctacatgatttccacgagggagtttccgaggtctgcgggcggtccagtttcgtcgcggaacagggatagccgttgcatccaacattaaagtaaatgacgtagggatggggcgatcactggacgagctggaagaggaccgatgagaggattccgatgttttcgataaggcccgggaacgaatctctcgacgtggaggcagagtccgcgagccacgctttggaggaattaccactgggatggtgttgatcgatctgcgggattcggtgttcggggtagagagaaggctagaataatccggcggcgtggatgggttcattccatgagactgaaagggtttctgcggcggcgccgagctgaataggaatgctctcgggaccatcatattgactgtttttcatcacacgaccacggttgctatagagcctcggctttaaccagatgaagcgctctggtcgagtttctgcgcgagatacatggatgaaggggagaagcgcaggaagtgagaagcccccagggagtcagacaagagaggaccagcagccaatccgaaggtgtgtgtgttggcccaaagacatgcaagggaagcggatagggccgtgagacaagggtatgcaggcacacacacgcgagccgataaggtaatagagacgagcgatcgagatgggagagtcgggaggatgaatatgagacaggagggtatgaaatgagcagaaggaggagaatggaaagaagtagagaagagatgaggtttaagatagagagagagataatgggaggaagtgtgggcggtccacgggtggtgatctcagatagataagccgtattgggcaggtaaccgcatgtaaagatcacgggaggtgcaggacgtaatttattttaccgtgtgattgattggtttgtgcggggaacaatgccggcagccggcttgcgtccgattgtaacggtatttcactcgattttcaatacaattcttattactcatggaacattccgccggtggagtccggaaggaaatgactttttatagttagtcatctcgatattttcattttatgccgtatattcgatattatgacatgtacaacatagtatctgcctaaatatggactctacaacgcatgattagcccaatggagtcagacatgcatatatagtatataagatgtatatagatgtatgaaaacgaatcacatccatcaacccttcagatcgttgaatagagatgtgggccctttaaggttgcttttagtgcgatgcgggcagatgcacacggttctctccaggttcaaggactaaaagagaagatgtattctacttaggtacattgactaatgtttgcttcttttctattaactagttaactagttaattaggaaagcaacttggaatgataaatacacatatgtaattggggtcacttgggtagatcggcaggagctccgagactcactccgtatctcccatatttaaggggaaaaacactaaaatggagcgggtggctgcagtccgaaaacgtaaactcgaagagatccgacgtggctagtggagcgccataagcgaaaacaattgcggtgaacccccttttttcttcctatattggtggcttataaatgtggctgttattgtaatttgattcatcgcacttccaattgtgtatcattgcttccggagcaatccgtacggagtcctccgtacacattgttacatatgcaaataagccttgaaaagcaaaagaaaaggggactacctaggtacactgttacctacattcgtatttgacctgttcgaaggattcttatagatgggaaatacacacacgtcaaaatgtcgataatgcgcacaatgcccaaaaacggaaaattcgagacgtggctagtggagcgcggttagggtaattgcggtgaacccttatataacatacgatgtaactatgttgtacaatatatagagtggtttttcccgtcttttggtgagattaggcagtcatgcatagtattataacatgattggctttatctattattcagtctgttttgctggcaattgtatgtaacctcgtctactccgtttttgtctgtaaccaacccaccaagggttgaatccttcagggaaaacccggaacaggtatccggaacatgtatcggggataatatcataagactcacctggcaagtgaagcaattttccctttccttaacaattatttcgatataatcatatggaatgagcctataatagacaaaactacctacaatcgtatgtacgtgtctccatgttgtaactagagccgccacgtgaatacattagtcagccacttatcgaaatggacatcccacactgcacagccatccagaggccggcgataaccacaccctgcgtcgtcgctcccaaggtgcttgcatccaatcatttcaagagcatcatcaatttctaatctcgccaaaattctgcactgggcttgtccccgtctccactgcgggtcattgcaatcgtggggtacatgattcattctacaagtgccaggcctgtgtaaatcttcaagcgtagctggtgcgtccatattttcttgttgtaaggcgcaatgtccgatctgagcgcctggctaaacagattgaatcgccatggatggtccgatagactaacatgccgacatagccaccgtgtgcaccctcgatgttctactaatgagctttgtactctaaaacatggacatcccatgtcgaggtttggaccagtcaccggcaaacacgacactaggcatgcgaacaggccccgcggagaaaccaccatactcagttcttgaatcgcacctatcaaactatctgagatcatgagtaccgaacgtgcccaaccgtctaaaagacgatgcgtcagcacagcctgtgtcgcgtgtcgcaaaaggaagtcaaaggttgggctttcgaattctgatgtcgaggtgtcacattactaatatctgcacgtagtgtgatggaaacctgcccagctgtgcagcttgctcctcggtatatcatacaccttgtatgtatctcgtttacagagagcaatacgagcattgctgactatgtattcataggtgtatatgatcccaactcggatcaccgccgcaaaggtgtctacaagaaggacaccgatacattgcgcacccgaaacaccaccttacagacattgatacaggcaatattaaactacgacgaagcggatgctttcgaattagtacgtcagattcgctcctgcgatgatctcgaagatgtagcggcttcggtgatcgcccaggagaaagggctcatgtctgcggaccaaacagcaaaggagtcagccagcaatgagaatgcggctgagatagatcaattcgagtccgagctggctggcaagatgagtgagctcatgctcgacggttctcgaaaatttattggaggtacctcgaacctcatcttcttgccgccaggctccgagttgcacgagtctgcttcgatccaaaacaatttcgtcctcgatggtaataatcaaacacacgctgtgagccgctggacagaagttacagacgactcctccctaatcagtcatcttatgaccatgtacttcgcatggcattatccgtttttcaccatcctagctaagaatatgttctatcgggattacatccgcggtgtctctagttcatattgctctgcattactcgtcaacgctatgctagccctgggctgccatttcagctcatggcaaggtgcttttgatgatccccagaatcttgcaacagcggggaatcatttcttcaaagaggccaagcgacttgtattggaaaatgacgaacatgagaatgcgaagctttgcacggtccaggcattcgcccttctgtctgtccgagaggcaggatgtggccgtgaaggaaaaggctgggtctatagtggtcttagtttccgcatggcttttgacctagggttaaatctcgattcggcaaatcttggggcgcacagtctcaccgacgaagagattgatgctcggcggatcaccttttggggttgctatctcattgacaagtcagtctccattcccttgcttatctccaatgcatctctaacactctacagatgctggtcaaattacctcggtcgtcaaccccagttaacctcgactaactctaatgtacccaaggctgatgtgttgccacaagaggaaatagagttatggtcgccatacactgatgctggagttggtcacgagcacacgcaaccgtcacgaaccagggctgtcgcgctgcagatatccaaactgtgtgagatcagcagcgatgtacttgtgctcttctaccatccaaccgaactcgaaaatcctcagtccaaacagtcggaactgaagaaactgagtggtgttcacacccggcttgaggcgtggaaaaataacctgcccagggaactggtggcaaaagacggacagctaccacaagtgctcgtcatgcagtaagttgacacctacgcacaaggcgttgcctcagctaactcttggctcagtatgctgtatcagcttcagataatccatttatatcggccattcctaaagtataccaaggctaatactccacttccttcccatgtctcacctcgcaagatatgcacccaggccgccgcgactgtttctaagctgctgcgtatgtacaaacgaggatatggactgaaacagatctgcaacatcgccgtctatattgcccacactgcatgcaccatccatcttctcaatctcccagacaaaaatgcccagagagacgtgatacacggcctcaagaacctcgaagaaatggcagtgggttggctctgcgctcgacgtaccctccgcatcctcgacatatccgcaaataaatggcaagtagagctaccacccgaagcaatctctatcttcgaacgaacacatcacaaatggggctcctggggctcctgggaccaagcgacttccccctcaacatccgacgactatcccatcccaaccatgccacacccctctacaagcccgagtcgattctcaccgtctgggctgccattcccacattctcacaccgagcccatcgccatggccgagacaccaatgggccctcaatacggacccctcgccaccgttccgatatcgttcccctccatgcaagggatgaatccacctcaagcccgacggcccgagtttgcccttcccgaaccaacatatctccggccccaagtcgcctaccaattcaaccccctcccgggatccgttccgactccctcttctcctcatccggacaactggtacgatggctctggggctcatatatcaccccaaaacgcaacgccgacatcggttgcatcgcccgtgtctgggtatgacggcacggaaaacctggtcgaggagagccatgactggtggtcgagaaatgccaacgcgtataacatcggcatggatggttggagtggtacttggaatactgctcctcaaaaccagccttctgtcattcactaccaggatggtaatctcatgtctgttgctcagccttctagttctggcgatgagcagttacaggccccggtgaggatgtcgacagtcgggtcgcccgatgacacgactgggtatgggagtaggtgggaataatgcgtggatttggtgatttttgacttatgggaacatatatcgtgcgctttttgataccacttgaggggcttcttatattttcccggcgtttatggacatgccatctacaaatttgtttctgttccgaaatcttacgatcaatttacagacaaaaacattcattgtcaaaagatttgtcatagatgatcattagttctcaaaaaccagaaccaaggtgcaaaaggctacttcccgaatgctgcttgaaagagaaagatataaaagaaaaaaaaaggtgcatgggatggtatcactaggcattgttgttagtacaatgatatcagtcaagacaacagaaaagaaaagaagagcttaccaagaaataatcagcgacaggcttcttcgcgggcatgccccgcgtatcctgcgctgcagcctcaaagacacggtatctccttcctgggctgacgactctattatctgcaacaatgccgttgctccgaccatattcaccgttactgcgagcgacagtgccaccgccgctggtgtcttcacccagctcaaggatagcggcaacattgccgcagcggtagcagtagttcggtgcagaccagacagtgacgatgccaccatcaaacatctctttatatccctccatcacaagctggtgtgcacgcgcgacaagagacaagccgttgagatggttgaactgtttgacgatatcgccgccgaagaggaacccagctccgcgcgggctcaacccccagccttcgatctcatccgggtctgaccagagcagatcgcacatagcaccttcatgtggcacctcttgcttgcggtcaatcagtcggattttatcgacagagtcaatgagcggtgataatccaccgtgtacacagagcaccgcaccagtccggctagtcacggcgctgccgttaccatcaccactcgcgcccgtgcccggtgcacccgatcgtgagggcgcggcagcctggcctggggcggcggatatgtctcgcggcggggagatatttctggaatctgtggatgcttcggaagaggaacgctgtcgcgggcggtatgtattcatcgtgaccacgcctttggaatccaatacttctatttccagctcgtcttcgtttgatgatgctgaggtgggtactagctctgagcttgcgcctagcacaatcgcgcccagggccaggtagtcgaatacttcgcagcaataccgccatacattggcgctgccgtattttcgaatgcattcgtcgtaaaaaccgtatactgttgtgatttggcgtgattcgtggttgccacggattagggtgatgcgatcggggtatcgaactttcaagcaaaggaggagaaggaaggattcaagggagtagaagccacggtcgacaaaatcgcccatgaaaaggtagttggtgtctggaacatcgccgccgacgcggaatagttccatcaaatcgtggaattggccgtggatatcgccgcaaatggtcacgggagcgtcaacggacacgacattgccttcttcgatcaagagctcacgtgccttgtagcaaagttcgcgtacttggctttcggggatcaggcgacaggcccgcagctgctcgatcgccctgttagaaacaaaacattagtttgacggtgaacgatggggggctacagatttgaggggttgatgccataccggtctaggttactcatcttgtcgaaagagggtgaaggggggaaggaaggaggaactgttatcgaagtcaagaaatccccttaaatagaaatcagatggctcagttctccgaaaaatacagtcccatcttcgcgaagctctgatgcgcaacgcagaaacttgggggaagcggaatatccaatcacgcgggagccagataagattagatgcacccgaagcccttcgctctcgtcttctctccgcactctttcctttgtgaccctttacatctgctattggaggtttaaaagtttgtcaacttgaataattctcactaaacattcaattgaccttcttttgcctgctattccttctcttcttgtccgactatacccgcctgcctactccgagccctccgatggcctgaaaaatccaagaaacagtcggccacgcctacctcgtctcaattgaacatcaatactcgttctctctcagttcacacacaatgccaccacatctacatcctcggtcgcggtcaactaccggcctattcgccggcacccttctcgcatctctcctagttgtgggaatgccgcacgtcttcccttgcccggccccacgacgtacctttgccgattcggagatgaccatgacagccaatggacaacaaataccacgcatccgacgcagacgacggaaggatggtgaagtgggcccagatgacatccagctgggtcagcctatgccagatgttgtcgatgaggaggtctcgacattccttcagatgaaggcggaagcagagaaactctcacacatcaatcgagaatgtcctgtccccaaacccaagggtgttattggggaattgctgggcttccgcgatatccatgcgaatgcccaccaccagtcaaccgccctgtccgaaggagaccaatagtgcgtgcacatcgacactctccttcgatctttttgcactttgttttctcggcttgtttaatgataccatggaatttgacaataagggtttggtggaccggtgaatgtttggaaaaaaaacaccctgcgagctagacctacaacatgtattctctatgtatagtgagatgtataaaagaaataccaattatattaagactagaaatagttgaaattcagacaattgccttacccacaaggtgttacccccaccttaaatgcagttagttgcagacatttatttagtacggcggagccagctccagccaccttgaatatttttcccgtcaaccatcgaccgtatctcgccatggcatcgacagacaagagcttcgtctacgacgtgctcactaatcagcgtcacacaaaatggattgcagctctactcattctaggcgacgcgttactctgcactctcgtcatatggaaaatcgcttgtaagaccgcgtccattgggtaccgaaccagatctagctaaccaagcaacaaccccagacactgagattgactggtcgacatatatgcagcaagtttctctatatatctccggtgaacatgactacaccctgatcaaaggctcaaccggtccgctcgtctaccccgccgcccacgtatacatctacaccctcctctatcacatcaccaatcaaggccgtgatattctcctcggacaggtgctcttcggcctgctctacctggctacactggctgtggtagttgcctgctacaggcaaacgggggcaccaccctaccttttcccgctccttgttctgtccaaacggctacatagcatattcgtcctgcgtatgtttaatgatgcggccgcgactttcgctatgtggctcgctatctacctgtgtctgagacgcagttggacggcgggaattgcagtgtggtctttcggggttgcaattaaaatgacacttgtgctgcttgcacctgccattgcggtcatcacccttctcagtttgggattggtgcgaagtctttcgcttggagctatggctattcttatccaggtgggttcttctcaagtcaatgagttctggggagtgggctaacgaaagaaactacagctcctgcttgcacttcccttcctccagacgaacagtacaggctacttttctcgggcatttgagctatctcgccaatttgtgttcgaatggacagtgaactggcgatttgtgggagaagagacattcctctcaacggagttctctgtgggcttgctagtgctgcatttatccttgttggctatcttcttcaaaaactgggtaaagccttcagggtcggacatggttcccttcctcgaagaaactctccagggacgccaaaagacagttacactcccaaaatccttcactatgaccgtgatgttgagctcactggccatcggaatgctatgtgccaggtccttgcattaccagtttttcgcgtatctcgcgtgggctaccccatttcttctctggcgcgcaggtctccacccaattcttatgtacgccttatgggcgctgcaagagtgggcttggaacgttttccccagcacaaacacaagctcgacggttgtggtgttgtcactcgcggtccaggtctttggcgtgtttttcaatggataaagcgaggtagttaagaagattgagaaggggagcaaccgcggcaaggcgattgtccaaaaatgagagatatcctggccccaattcatactgaggtgtgcatatttcgagaatcattgttgatagcactgaatcctgtgtaccgtagcaaccattgaacaaacgcttgatgcctttgaaaggcgatcattcagtctgattcgtccgaggaaggcatttggcctacacgagactcctcttcgtcgtcagagtcagcagccaatacaacgggttgtttcacgaattccttaggcctgggaaagcagttccagttagcgaacgagtccaggcttcttaatcgaaatcacataccaaaagcgagccttcctccaagccttctcgtccctgacgatattgacaatttcccctccaattttattttcccgctcctcctggcccttagtatcgaccacgaggtacgaactgcgcttgatccagatagccgagcggaatcgtgcaggtaattcgacgagcatctgcttcttgtctgtctgttcgactaggtagatgttgtttccggtagctttgattgctcgcacgatctgctgagtgtcggataactcgtctggaggggtcaaggttccctctgccgtagccatcatctttcggcgaggcggtcccattgttgaagatgtaaattgaaatttatggtcacgaatgcagagatcgagtgcaagagaaagttgggaaccttggaaggaaataattctccggaaattaactgatcttatcggtggggcaggtttcccctgcccgcattactccagttgcctcatactatggccttggaagattgtgccggtatgggatcaaatcagcattttgaaggagaagtttactcatttaatgttcctccgggggcttgggtctacggttatatctgatcaggtaccaaatgcggcaatattgaatatccttcacaagaaggctcccttgatctgcaagcttctctcttccgcctaccaagtcgtggtcccccaagacgaactaaaggccaggcgtctcagactatgaattgaattgacgactttggactcagttcgcgatgtacctcgtgaacttcggcaatatcatggtagtttgacacaccgcctttcagagccgcctcgcgttgttgtttaatctgcatctttgtgagtggtgtacagtcaacatgcccaagggtcccaattcaacaaatggacgcgtctccaagacgtctgcccctactcggtattgaatgagccaaatatcgccgcgttagaacgagagatcactgcacctactgatcaagtgcaactaaacacgttccggctcgtccagctcgtgtagctcccaattcacttgatgacgtacaagagaacatcttgattcagtggaatcggcaggtgaaggagctattagctcttcctatggggcctctcatcaccataagcgcaaaccaaattcttaatggagatgggaacgacaccactgtcagcaaggcatgggttgatcgcttcatcaagcgcctgccagatgatctaaagccacctaaagcacgatcagtcaagaaaaaacgtcttgatgcatcagatcaggagactttggaacattggtatggacgtctgaaagctgtcattgccggggtttccccagaaaatatctacaatttcgacgacaccatcttccaaattggcgagggagtgaaaccccaaatggtcgttaccagtatgggattgggattcgcctctcatcaaactagaacctactgtgaatggataaccaccatcgagtgtattgccgccgatggatgggcagccgatccatttatccttattcaaggcgaccactattacgacgagtggttggaatacggaggagctcccgatgaagctgtattcatggtgaacccgagcggccgggttaaagagcaggttgcatgcgagtggatcgagtgtttccatcgccagaccaaagatcgcactgcggacggtcaatctcgtctcctactcttcaggggccaacctcaatatttgagttacaagttcctcccgttttgcgagcaacacaagatcattccctttagctttccgcccaatataggacatctcatacagccttttgacagcaaacctttcaaaaattacaagcagtattggagaagtcaaggccttattgcttacatgattgacgatcccgatgatgagaaaacagccttcatcaatggcctccctaagatccgtgaggaatcattcaaacctcaagtaatcacggacgcatttgccgacagaggcattgtgccatttgacccgtccaaataggtcaaccactttgagaaaccccctccatgatggcagacgcgctttattatagataggatttcaccaccaggagaattatatgtttcgtatcctactaggtactgagaaaatcaagattgggatgaattggtttgtttggatagcatgcgtggattattacgcgtagtacgcgtggtattggcgcacaaaggataagatataggatctattcattgcggtttcactcgataactagtccagcgtactatgcagatagataccttccgttacaaatgttcctggaacgtgattagaatccgataatagggtgcaatatagaccgaacccctgcttcatattattgtctccagcagaagaatgatcttacatttcgccaaaattatatatcatcacctcattttcattagctgacaaatgtaggatctaatgctccataaatcgggcttaatctgcacgataatggtagatgtaagattaatgtcctatgcattcaattcggagcattggccttgcaatgtatctaccgtgtctccatccattggctgtgaaacgagtgacatcaccattctaagccgaaaagacagagagacgactaaatcatcagataccaggatctccctcaatgtatacagtaaggggtgagtggcacgatctctgtgcccgatgagaaatctgacaaggcggtgacacttccaattataatattgtacggtgaagtgccaagtgtgtcgatcactggtcaaaggcttcggaagtatgtgtgtcctatacgatgtcgtgtgtctgtagatagcctacatagggaagagtatgcccgatttgggcaatccataagcaggtatcaccacgtacatatgtagacatagctacatgtatcttaatctaagatatagccctagatatatgcacatgtacctacttcgtatgtatggactgttactactttgtgctctaacccgacttttcgccacttccttatcggaggtgcgtggtagtacggccttcccaagtaactcccgcgtgggcttcttccctggatctaatccatcggggaaaattaaacgattctctttcttcttacctccatcgatctctttctttcatctgctttttcctggattttatcaatccaatttcggctgtaaaccaactgggcgatcatcgcgggcagtctgtctcacattttccgaagtggcattagttacccgtgcccgttgcgccccttgtcaacaacagccccgcgaatactctcccaccaacaacccactttgacctggcgcaagcgcacccttgaattttgagctagccttgctctttgccctcgtcaaacctgtcatcatggatggggacgagctgatcgcctcggtcttccgcaagatcgagcgggagaaggccctcatcaccgctgccagtaacatgcggcagtcgaccgacaatcccctcgtgcaacagagagtcgatgccaacattcgcgatggtcgcaagaatatcgcttatttggaggagaaaatgagggaattacaaattcgccagatgaaccaggaaggaggcccggctcccccgcccaaaggccatggcgaaggtgaacactacactcagggcggctctggctcgatgccttccggtgccccattcgccgatcctcgaccttatgctccgatcccaaaggcgcggcccaattacacgaagctaggtacgttcttacatccgttcggaaatgctgcgctgagcttaaattgcttggaatgctaatatgaatggcgatgtctcagatctgatcaagtatgacactccgtacctcggaccgaagatccagctcatgctgtcccaattggagttcaagctgagcgtggaaatgcaatataaagccggtattgaaaagatggtccgcttgtaccaggatgagggcgaccggaagagccgagctgatgccgagggccgtcgcattgagagcaaccaaaagattcagcttctgaagcaggcgctcaagcgatacgaggatcttcatgtggatattgaatcgggcgatgcgccagacggtatgagaaatataacaattttgctacaagtataacgcgacatggttactaactggtggtacagatgagagtcttagtactccgaacatgcgcaagccgctgacgggtctgctgacaatgcgcatccatgcggtcaaggacgtggaccatgcggccagttcgcgattttctcgaggaccggagacatacattgtcgtcaaggttgaagacacgatcaaagcgaggaccaaggctacccggaacgataaatggttagacgaaagcttttccatggacatcgataaggcaaacgagattgaattgactgtctatgacaaggcgggagatcgcccggtaccaatcggtatgctttgggtgcgcatttctgacatcgcagaggagatgcgtcgcaagaagattgagacggagctcaacgcgtctggctgggtatccgcagataagatgggcgatggtggatcccctcgacatgatcaggctggttctcctatgggatcttcacatggccctggctccggaggacgaccaggcacctcgggacatggtgcacatggacacggtggcgagagctcaaatgctcccccgactgtgacgatcgattcatggtttgccctagaaccggttggccgagtccagcttcaaatgagcttcggtaagcctaatatgcattgacccccgaagaagagaccctatgtgctaactggatatagccaaacaattaaaagaccgtcgtccctttgacattggtcttaaccgtcaaggtgccgtgcgccaaaagaaggaggaggttcacgagaagcagggccacaagttcgtcacccagcagttttacaacattatgcgctgtgcactatgtggagaatttctcaagtatgctgccggcatgcaatgtgcggattgcaaatacacctgccacaaaaagtgttaccccaaggttgtcaccaagtgtatcagcaaagccaattacgagaccgatccggacgaggagaaaatcaaccaccgtattccccaccgattcgaaggcttttccaacatctctgcgaactggtgctgtcactgcggctatctccttccgtttggacgcaaaaatgctaagcgctgctctggtaggcaatattactgacatcgcagcttatttctagtccatgctgacctcctttacagaatgtggtcttacgtgtcatgctcagtgcactcatcttgtgcccgatttctgtggaatgacgatggaagccgccaaccaaattctagagacgttgattcgtaccaagaatcataacaagtctgcctctgttagttctggcctcagcaaccgtacccttcgagcaggcggtcccccggggccccctcaagacaacgctgccctctcctatccccagaaaccgatggaaggaccctacgggtctattcctagacaaccctccgcagaagcggtaagcgctgccactaactccttcgcaaccccacagtcaccaacagctgctgcacaggctgcacagcgccaacagattccaccgaaatcgcctcctggaccttccgccgccgctgccgccgccgctgcagctaccgggctacgtagcccccagcaagccccaggtatgcaactaccgattatgcgttgaagagagactcttggtactaatcaaatcttagctgaaatgggccgtcctatgctgccaccccaggcacccccgcagcctcaacacgcccattatgacccgtccgcttatgccaatttcccgcagcagcctccaccccaggctatggcggtgcagcctgcggcttatccaatggcaccacctccgcagcccatccagcaacagatgccccaacagcaagttgcacctcctatcaaggacgatgctgcagcgcaggcaaaggctcgcattggattggatcacttcaatttccttgctgttctcggaaaaggtaatttcggaaaggtcatgttggctgaaacaaagagctcccgcaagttgtatgccatcaaggtgttgaagaaggaattcattatcgagaacgatgaagtggagagcaccaaatccgagaagcgtgtcttcctaatcgccaacaaggaacgtcacccattcctcctcaacttgcacgcttgtttccagaccgaaactcgtgtctatttcgtcatggagtatatcagtggtggtgatctcatgctacacattcagcgtggccaattcggtctcaagagggcacagtaagtcctacgcttaatcttggttcttttaccggttggaaatgctcacatctctcaggttttatgccgctgaggtctgcttggcactcaagtacttccacgagaacggtgtcatctaccgtgatctgaagctcgataacattctgttgaccatggatggccacatcaaaattgctgattatggtctttgcaaggaaaacatgtggtatggcggtacaactagcacgttctgcggtactcctgaattcatgggcccggaagtaagtgggatcaggttttattatgtctttctgcagtaccgatgagctaattttgtcatagattttgctggacaagaagtacggacgggctgtggattggtgggcgttcggtgtcctcatttaccagatgcttttgcagcagtctccattccgtggtgaagatgaggatgaaatttacgatgccattcttgccgacgagcctctctaccccattcatatgcctcgcgactccgtgtcgattctccagaagctgttgactcgtgagcccgagttgcgtctgggttccggtcccaccgatgcccaagaagtgatgtctcatgccttcttccgcaacataaactgggatgatatctaccacaagcgggtccccccgccattcattcctacaatcagcagtcctaccgataccagcaacttcgaccaggagttcaccagtgtgactccagtgctgacccctgtacaatctggtaagatctttattatctgcttgctgggagataaattttaactaaccgatcctttttatttagtgctttcgcaagccatgcaggaagaattccgcggattctcctatactgccgactttgcttgattccaccgacgtgtgatcgggataattattgctcgcttggacacctgtcacaagttgttgacgagagtgttaattcggttcatggggggtttaatgccgacacgtccggtttcttcagggcgctgcgggtcctccgccctttccagcacttctcgctcttcaaattgcttcaacatacccaatttcagtttcgtttttaagtgcaggcggacctcactgacatgcttcgatcgccggataccatggttaatgaaaccttcaggttgcttttgctttctcgatttctttgtgtgcttatctaaattgcttgctctatttttcccctctcgagttcttttgttctgtctaagttttctttccgactggtcgggtttatgactctattctatgtcgggcatttgatgtccaaaaatggagaaggggcgggttcccatatgggaactgtgtgaagtggttttaagagagtttgatgagaaatgacgaagtttgaagatctatgaagatagcgtaggtccctccagggactcgtgcgcgttatgtccggttttatgttctagcggttcgtggtatgaagagagggagatacaaatacgaaataatatatcccatctgtctattttgtagttggatcacggttttatattcacttgaatctagattcacatgtgtctgcccccgccccttcccagttgagggctgccctacctcgttccttcccaaataggaagccaaacgtgccttcctctcttgcgagagcacccgttttgtttgtttacctttgtcctctcttcctcacctctctacttccctacttcttctttttcaatttctttttatcactgttcatccaaccacttttctttgttccagaaatagatcaagctaccgaggtctatttcgaagatgctgccaaagattgaacgcctgtttcatcggggctatcgggccttgagtaaatcagtcgggaccgtgacttctaacaacaaagagaacctgccttcggtaaacaaagaaccctcgccctcgggcaacaaagaacacaccccaaaggcgagccaagtgccgtcaagttcccaccccatcaggaaatggctcaaaaacgtgataaaccctgtggatgggtctcccgcaaacaaggtgagacctaaagtcgatgatattgacttctacatcgacttctctgagacttcagaatcgagatccaccccggcctggtctaacgagacttgggataaccattagagttccgtgcaactcatcactccccccacggaccggacactatgatccaatcacttccttctccctctcttgctactccggtccagccacaaccgacggttgaacctactcctctcgaccgtccttccccgtcgctgaacactctttctggcacgattattcagttcagcgaacatggtcggattgtaagttttgtctttataatggcttattacatcactttaaccttagttatctctctcttacagttcttttctcacttacatattactgactcccataccaggcgacctcaaccaaagaaacagccttcttccccgaggatacagagcctcagtatctggctaagcaagttaagctcgagccacaggattctgttacaaaacgcaagcggtctgaggacactgacgtcaatgaggacgacaaatgggactccgagccgcccacctcacctgaatacaatatttctattgcgagtgatggtggtgatagcgataccagcgacgcttcttcatcaccacacgcgaagcgagtaaagagagctgctttacatccctcggtcaagagcggccgctcgattaagcccaaagtcggaaagaccagaaggaagaagaagaagggaacatgggattcggataggtcaatgtctgagccaagtgacctcgacgagagcgaggaagaatacatcattccgacaggagagcgcgatgagctgctcaataataagctgacccgagaaagagcaaagcgcctacttgaagcagtagaactcccccagggccacgacctgtcaccagacgaacagcggactgctcatcaacttcttactcgtggctgcatgccaactatccaccgacattgggagaaagatttctccacccttccagagtccctgttcttttctgggaaagatgatgaaggtcaacgtaatgaatccaactttatccttgaaaacgataaatgttccgagttttacgcgatccgcgcattccaagagcttttgaagatatgtggtaatgtgagggactattgcaatatccttgacatatgtcctgcaatctacatcaagaagtcaatagagaagtacttgcgctgggcattgagcgatgccggtgtcagggtccagccgaacacaccccctgtgcacgttatctatcgcaaacctcaggacgaagagccaaaagaagcctttaatagagttgccaaaacattggaggatctatcgaatacctggcagagccaactcgctggaccccatgatggtgaagaagcctggccggcattgatggggctcgttctctgtgggcctgttctttctgtcatctctctggacaccaatcccaatccgcaaaccctaacacacggaatcaagttccttggtcatttcgacctttcagatttcgataatgatgtctggaacaccctggctatcgcgatcatcgtcatgcacatcagaaggaccgtgaccaaactcgcaaaggcctactatcacaggtttgtggcctcgatctttgatggccctgccatgaatttcccggatcctgatcgttaattctcgtcatgctacctcgagatctatgagactctctggctgcaactacttttagcatgtcacacagagctctcgaaatatatatcaaacaaagcttgggaagggaacagtatccatggtcatcctcgaggattcctgcgaattcgatcagccgtaatcactccgggtttagttataggcatgtctttctcgggaattttcgaaccctcgttagaatctagcgcttgagtcatggccaattagttcactgaatgacgtgctataaccttttcctatacgtagaacaagaattgtcgtgcctcgtgtctttggagtttttttatcattagatttcctcctattgtgctatgttgatagatgataggttcacaattacgaatggatgtatggcatgccagtggagctcagtccttgctatgtagaagcactattgccaacggaagtgtcgcgaccaatgcaaggattgattcgtcaaatctccacttttgttgttgaatacttgtttttccctttctgttttcaatttgaaccattcttgtcattgcatcccaatgaactcaatataaagaacaatatagtgtgttttcacgaatccggagaactcccggcgccctaaaaaaatcttccacaatgatctccgaagaccatgggggtatagaatactccccgttgctgcgcaacatcgatccagaagcggcagacaattccaagaagtcaggatggcgacaggaattagcgattatctcgcgatattcagcccccctaatgatatcgctcctacttcagcatgcattgaccggctctagcatcttcatggtgggccatctggggaaacgagaaattggggccgtgagcttggccaacatgacttcccagatcactggatattttgtctttcaaggcctatcaacatgtttggatacgttatgtcctcaagcatatggctcagggaatttgaccttggtcggccttcacgttcaacgcctgacgcttttcatgatcgtcctcacaattccaatcggggctgtatggtggaatgcggatcgaatatttctcctcatcctaccgtctgaagcccaggagacagctcttcttgcagggctgtatctgaaaattgccatcgcgggcgctcctggctatgcttgctttgagtccggaaagcgatttttccaggcacagggattattcagtgctagtctgctagttcttgtattatgttctacgttgaatattttcatgggctggttatttgtttgggtatattattcctccttagaactccccgagccatccactgatttcccgttcttttccagagactgcaatggggcttcgtcggtgcacccatcgctgttgcagtcgcaaatagtcttctgcctatctttctggcattctacgccatcttcattaagggctctgagtgctggcaccccctttctgccaagatgtggcgcagctggggtccaatgttgaagcttgctataccgagttggctaatgatcgaagccgaggtccttgcgtgggaaatcatgacactcatttcgtcccatttaggtgcgactgagctcgcagctcaggctgctatatcgacactttcagactttgcctttcaaatctcattttccatcgccgttgctggtggcacacacattgcctatctgattggagcaggtctcccacagcgtgcagcaacatcagccaacgttatggtttttgcgtccttcggtgcgggcataacaaatatgcttgtgattcttgctctgcggagcgtcatccctggcttatttagtgatattggagaggtctggcacttgatcttctttttgcttccagtgggtgccgtccttcaaattcccgacgccgtggccacttccctcaatagcttgctgcgagctgtgggacgaccggatctgggtagctatgttcagctctcgatctactacctcgtcggattgcccctgggcattgctttagcatttggcctaggttggagcgttttcgggctatggtgtggaatttttatcggccaatcgatcattgtgttgatcgagggtttttatttctggaaaatggtggactgggcgaaggcatcccgagaagctgtagagcggatgtgatcatggaaagagagtttcaaaagccatgaaatatatcatggcatgtacgacgaatataaaacaacaagcaccggccttgttatgtttttggttagactttttttccataatattctcttaagagctcaacgggaaaaggtgtataccctctcctaaagattcttttatctcttgtttacttgtaaatctacagaggagttcgtatggtgagcgaaataacaaacctttatatacttatgcgtcacatgaccggtcccgctgttgacgctattcccaacaccgcaatcttcaactgcatcacccagcattccaccatggatgccgccgaggatcgagacgtgaagcttcaacgggcctctggggatttggtgtccgagttttcggcaaagctgcccttgctactgtggagagcccaaactaggactcccccccgcaccccacgtaaatgggcgcaggccaccaaaacagagaagcttgttagccttgtaagatgcaccacatagctccctcttgattacgtctctgtgtgaatttactgatgttatctgcagcttgaaccctttcaagagtggcctcaactcttagatccacatttgcagacattactgcctcctttagtggacgcttttctagcatatctgatcaagcaccgcacccaatatggctctgtttcgccgaagtcatcccagataggaaaattttatcccctaccaagagctatctgcaggctactttacactttttgcaaagtccgtggcgtcaaagtggttagcaggttcttgaacaatgagccgaaatatcttgattcaatgattcgggccttcatcgaatgggatgaggtcagaccatccaattccgaggaattggtcgaatccgacacccagcgactcatctgggaagaacgctatgtgatgctggtctggctttcacatcttctgcttgctcctttcgacttgtcttctttatcatcagatgacattccggtgccctatgacaatctgcaacagttggcttggctaccatctgaaactcctatggttgctaggtcggttctttccttgtcgttgcactatattggtgcatcgggcaaagaacgcgaggcagcgacagcgcttttggcacgattggctttgcgtggagatatgcaagctctaggtatgcttacaggtctgacgaagtgggcttttgctgtcatccagccgacggagaatgtcgaaccaccatctgtctatgcttgtattggagtgctcacattcattgctcgcttgggtgcatccggccaggtagaagactttgctccattgatcaattatgtcttccagcagacttccagtgtattccagggaaattctccaatctctgcgacaatccagtcttcggcgttggctaggaaaattgttgtcaagatccttcgcaacatcacaaccatggccttatctttgaatgagcgaggtgaccgccacatcacggatgatcagttatcaaccatattggaagatgcaatcgatcatttcttggtctccttggccgacaaagatacgcccgtgcgatttgccgcgagtaaagcactcagcattatcacattgaaattagaccctgaaatggcgactgaggtcaccgaagcggtcattggctcgttgggggagaacatcctcttcgaaactgatgatggctccctcgtgactccatttgaagcacggaagattggtacacacacccttaagcgtaatctcagtgcagtcgatgcccagcgatggcaaggattaatcctgacactgtcacatttacttttccgccgggcacctcctattcaccaactccctgaaattcttcaatcacttgtgtcgggtttgtgcttcgagcaaaggtcttctactggtggctctatgggaactggtgttcgagatgcggcatgcttcggtatttgggccatgtctcgaaagtatacgacacaagaacttctggcgttgcaaccccaggtagtggcgtcacaatctggcaagaaggaggtcgatgttctgcaaaagctggccgtggaactcatctgtgctgcctgtatcgatccgtctgggaacatccgacgtgggtcgtccgctgcgctacaagagttgatcggtcgtcatcccaataccattgcggagggcattcccctcgtgcaggttgtggattatcatgccgttgcaagacgttctcgtgcactaattgatgttgctaaagcaacagcctctttggatctgatttgctggagtccgcttcttgaggctttgatggattggagaggtattggttctccagatgccgagtcccgaagatatgcggctaagtctattggaactttgagtactcaggagctattcaaaaccatgaatctggttttagagaagttgctgcaaatgttctccagcatctctcgacatgatgtggaatctcgacatggctgtctgttatctattgctgccacggtcgatgcctttacctcgcaatgggaagcatcaatggagaatagagataccccggaagccagggctgtttcatctcaagttgccaatatctgggatatctttggttctgcatcaagccctaccgatgatgacttgaccttacatacttcacgccccgagttgacagcagaggcatcatcttgcttgatctcctcactatctcggtctaccaccataacaggcctggctcaaccttcagaatcacttctgaaccgaacactgcacattctgtcgctctgtgtttctcggagcgatgatatctcgattgatgcatcttcgaccgccttggcacagctgttccctctcctatcaccatcaaagcaggaagaaactgtgcgtacttggttctctcatcttcgtgattcatggagaatgccgacgggtcggggtcaaattctagcacttggtacagtgttcaagcaactcgcagcacaaagtgatgtccaagaaaacatcatcaccgagattcttcattacaccgggaaggaagaggttattgagaaaagagttgctgctgtgaagtgcttggccaccggtatcttgccatatatgggtaatacttcttgttcactagctggtacgaaaaaggctaacaagatcttagctactactaatactgttgcaagcaactttgtcgatttcttgaatgattacaccactgacagacgaggtgatattggatctcttatccgagtcgaagcaatacaagcagtcggcatcttgcttcgaagagagttggaaacaacaccacgctcaccacttattcatgatctggttgggtgtctctgccgccttgcatgcgaaaagctcgacaaggtcagactacaagcatggctctccctgcaggacttttgggaatcagcagcggatctacccccacttgaaaggtaatcttaccgataaagcaattatttgatgacggtgctaacaaaaacaggaaatttgagcacttcagtcatgtttcgtcacaagattactttgctcagttaattactctacaggatgttgactggcttcgtcttcctttgttacaaggacttgctacctctgctatctcgggagcagaaggtctcgtccgagcatctcgctcggctctgacccagttcctcaattctcaatcccaatcccgacgccaggagatattgatggtcttcttgcaggatcttgctacagttctagatgacaaccttcaagatgaccgttttgccattcctgcagtcgagtttgttgcattcttgattgatagttacattcctgttatcccggaagcctcagatcctaggtttgtgaccttgtcttcgttgcttatatatctacatcattccctgacatcttctttctagtttccgaaagttgttcacgctggtccagaaagcacatttcagatccgcaaatatagctcgattggaagctgcagtcaaagtttatgctgcattatcaaggattgactcgttacgagggggtgttttgaagaagatgaccgggctgcttttgcatcctttcccaaaggcacgttagatctcatacgtatggatttacggtactgacagttgggttttaggtccgatcaaccgccgcagaatacctgtttgttgtgactgactctgaaattgtcaagtatgaagactggtctgtttcgcctaaacagctgaagccccaggtggataatttgaaggtcgctctgtctttgaaggggtagcagcccacagaaatgtcatgaaactcaaatatgcagcgagttaataacaacagctgaaaatataagatacaaagcatggatggacatggggtgtaaaatctttgggctttggctgtgatgagtactagtacttgtggctgctgtgccagtggcagtacttgtaccagtactcgtggtggtacttgttgtgctcgtcttgctcgagtgatcctccgcaaagaaatcaaatatgtattgagtggcattgaattccgacttacccaacgggcactgtgcggcatttcgggtaaagtcatcattgccaacagtacttggccagcaatggccattgtcactctcacggtaatgctgaacgatgccttttagcccgttgcagtcccaagaagcatgcttcacgagcgggtcgtcaaagacagtcacattgctggtgggctgcgcattgtccgcacatccattttgagccgcccaggcctgcaggacatcaatgacgggcagcttagcatccccgtcgccatcgataggcgccgtcgtgtcaaccgtaccatgaaactccaagaaaggatacccctcatcccgcttagcgggggcgcaagaccccacacccttcatgtcggctgtatcataccaggcgccactgacagccgcaaaagccgcaaaccggcttcctacggtggcgttgcaggcgatcacgctggtgaaaccaccgccattcgacttgcccgccgagtatactctggttgtgtcgatgcagagggtttcttccatgtgcgtgagcagatcgttggtgaagtccaggtcgttgggacgcgacgtgtttgcataagggctggagagccagtatccattcttgctgtttgggtagatggcaattccgtcggggttgaattccgggtttgagaattgtgacagactttcttcctctaccatgtcgcgccccgccccgtggaaggagaaatataccggggttggcgtgttcttgtcatagctggtaggaatgtatagtctgtattcccggtctgtgtttgggagggagagggactcgcttgatcctgctttgggatacttggaaggtatgtcttcgccacagcccggggttttggctatgctgatgctcgtgagggctgcgagggatagcagcgatgtgaggcgcatattgtttggggcgggtgcccaggtggtctagtttcttgagggatacatggcttggcttttatatgggactgggggattgattgagagattgagggattaaggactgaaagatttaccaatacaaaccccttagcctgagcatataccacggaagcccgactgaggaacgaacagagtggatccgaggcacccgccaagactccagtgccacgggcgatctcttatcttttcaaaccttacctttgcgcccaacacgcttaaatgatcgatctacaacaacggaagtcctcgggtatgtatgcgaattattattgccttgaagattagaagccgagaataaacaagacatgaagatccatggatgatctgtccttagtgagcgcttaagattatacccattgaaactttattattcttcatgcatcgaagattggcttcacccatgccaaattgggacatgctaattaaagatgaggaagatcaatggatacagttcaaaaccagataatgtgagatagtacgcaggagttatacccacttcaatatactctgtactgaattataattaggtaggcattggttttagtgtacagtaacgggtagaatagaatatgaaaaaaaaaaagagagcaaatagaaaaataaaaaaagaagtgcatcatccgtgaatcgaacacgggcctcgtcgatggcaacgacgaattctaccactagaccaatgatgctagttcatgtgatgtgaccaattattatgcaagatacccctatctcccttccaatctcatttcatccgcctctagtcaaccagaagctcgacctcgctggtttctagagctccacagtcgcaaacatggctgccgtctcagcagctggtattcccccgaatgcgacgtgagtactatatctacatgctatgtccccatgctaacaagtcttcacagagtatatgtgcgcctgtccctcccctccatcatatcaccactccgctcccgcattaccatactgaccgattgcttccccctattaggtcaagaatctcgacgagcgaatcaagcttgagcagttgaagcatgccctggaggagatcttttccgaatatggcaccattctagaggtcgtcgcaaagactaacctcaaagctaagggccaggccttcatcgtctttgacaacgtcgaatccgctacccgcgctattgaggatatcaacggcttcgatctctttgagaagcctatggtgctggattatgcgaagacacctagtgatgcgacagtccagcgggagggtggcagcgaagagctcgaggctcacaagcggagacgcttagctgagaaaggtacgtttaacagataccggcgcactaaatacaaatactcaatccgtactaatgattgtcgttttacagagcgcaaacaagcccacgaggccctcgaagcacagaagaaactcaagcgtcctgctgccgccgtcgaacccgcacgcccagccaagaccaccaaaggtgccggtctcaaacccaccgctgccgctaccaccgctgtcgtcccagacgagtacctcccgcccaacaagattctgttcttgcgggaactaccagaagacgcaacccaggaaggtctgtctgctatttttggccggttcgaaggatttcaggaagtcagattggtgcctggtcgcaagggaattgcattcgtggaatacgaggccgaggctggagcaatcagcgcaaaggaggctacatcaggcatgcccatgggcgaccagggcaaggcgattcgcgttacctaccagcgacagtagtcgtgggtggtttgttgcatcctacaaaatatcccggtctcgttctttctggcgtttggaaggtcttgtctcaagtacatgtgtattagaaatacggagagctttatggctgtcgtcttgctttcgcaatgcgtcaacattgcatatcacatgaacttcaatattccacaaagtagatgaaacgagtcatagggctgaaacgagtatgagcatataacgtggtacatgtcacggtcaaaaaagaagatgtgaacaagaagagtatcaatacgaaacaaaatagcagcctagaaaatgacatcgttgtcttcctggtcacccagaacatctacggtatctgcctcttcaacgaagagagcaggagaagcagctgccttggggtttttcccttgctcttctgctgccttttgccgggccgcgagaatctcagcgtcggcagcagcaacgtctctctgcttcttgcctgagactttcttcaggcggtagaattcctctcggtcgagctcatcgagttcagagttgatgtcttcagaatggttagtctgtgcaagggacgctggagatagatggtacaaacatttgatagtgttctcggtccgaggaataataacatgctcactgttgtatatatgttagtatcctgaacaaggaccagattcacaagttccgatcttacatagcatttactaatcacgcaagttagataccagccgtaagccgtcacagtccatgagaaaatgacttacctcttcggttgacaaccttgatcacttcatccagaatcaagaaagcagtctggcacaattggtgagcaatattcccatacgctacatagataccacgcatacctgtaagcttgccaattccaccaatgtctccacggcccgtgcatatgtctctcgacaacgttgaatctgctgtcctccctttcctagccctgtcagaccgaagtcattgacaccctcctgcgtgtagctttcaaatgtgggtagaagaacaccagaaacgttctcttgcttggttcgcacgcggaaacgagcctgcttggcagactcctgaatctggtagccgatatctccgcctaccgcatagctcacttccgccagtgagaaggcagcaatctgcatgacccgacccatcttttgtttggcttcatcgatgcggcgtgtaatatctgtagaagtatgattagcgtcttgatagggtggggaacgggaatgtgtcgcatcataccgcggaaacgtctgtgaacaggacagagagtcagtatatactccaagaagcaagagaggcacagggatctgactttgttagagcttcactctttctcttcagtaaactatggccaatttccgcgcccttcagcttgttcttcatcaaccccaatgattggcgagtcggaaatactgcctctcggccctaaatagacgtcagatgaagtcaatatgcgggctcagttccacaatagactcaccacagcgccggacatgattgcagcagaacaaatatcacgatatagtccttgttgttcagcttgagcaacacggccacattcacattggtatgacgccgataaagctccaccgcccacctgatacggatgaagcacgtgatataatcaatgtgggaacctcatccgtcaacagatttggctttctacgcgcatgcctgcagtctcttgtttatgcaattttcctttatgctgacacgttgatcgtgtaattggatttcgctcgactgagtggcgcaatgccagggacgcttttgcccccgagatcccaccggcagcacgcagagatggatcgaccatctgcgtcccggccggacctctacttgatcgtgagttttgacccattggaccatttgaactggaagcttacttgcattctaccactagactgatcaagacatcatttacgaacaagatctgcttcgcgacgctagtagtgtcaagccatggcttgcctatatcgaattcaaacagcaaaatggcacgctctatgagcaagcatttgtacgtcgtcacctaccacaaccgagtccctatggatcataactaatataatggcattcatcaggtcatggagcgcgcttgcaagcagttgccgcgttcatacaagctctggaagatggtaagtgacatttttttttcagaagaacttctaagtctttgctcttactgaccttcgtagtatctggagttccgtacaaagcacttgaagggccgcaatcccatggtctatcgcgccgaataccagaaagtcaacgcactcttcgaacgagccctgatcctcctgaacaagatgccgcgcatctgggaaatgtacctatcattcctgctccagcagcccatggtgacccagactcgacgaaccttcgaccgttcccttcgcgcattgccggtcacacagcacaaccgaatttggagactgtacaaaggcttcgctcgggctgcttccgggcagactgccattaagatctttgctcggtacatgcaaattcaccccgagaacgtcgaggattacatagagcttcttgttgaaaatggtgaatatacggaagccgtgaagaaatacatggatatcctcgacgatccacgattcaagtccaaacatggcaaaggcccattccaattatggtcggagatggttgatctcctggtctcccaggccaaaaagatacagaccggccctcaggtcggaatcgatgttgatgccattcttcggagtggcatcgaacgctttgcggaccagaggggcaagttgtgggccgggttggccacatactggatcaccaagggtaacttcgagaaggcacgggatgtcttcgaggaaggaatcactactgtcatgacagttcgtgatttcactctcatcttcgactcctatgtcgagtttgaggagtctatcattggaagcttgatggagggcgcagcccttcgctctgacaagggtaaagccgacgaagatgcagactttgatcttgacctccgcatgctccgcttcgaacagctgatggaccgcagaccattcttggtgaacgatgtactcctacggcagaaccctaacaacgtcatcgaatgggaaaagagagtagcactctggggcgataataagaaagaagccatccaaacctacacggatgccgtttttgcaattaaccccagcaaagcacatggaaaattctccgagctttgggttaattatgccaagctttatgagaacggcggggacttggataatgcaagagtcattttcgacaaggctgccaaagttccattcaagtctgtatctgaactggcagacatctggtgtgaatgggccgaaatggagctccgtgccgagaatttcgacaaagcagtcagcataatggaaaaggcgacacaggcacctaagaaatcgacggtggactacttcgatgagacactgtctccactacaaagaattcacaagagctggaagctatggagtttctatgttgatcttgttgagagtgtttcgtctctggaagaaaccaaaaaggtctacgagcggatcttcgagcttcgcatcgccacacctcaaacagtcgttaactacgccaatctcttggaagaaaacaagtacttcgaagaatctttcaaggtatacgagcgaggcttggatcttttcatgtatccggttgcattcgagctctggaacttgtacttgaccaaggctgtggatcggcaggtcggcattgagcgactccgagatctgttcgagcaggccttggaggattgtccctccaagtttgccaagtctctttacctgatgtacggcaacttagaagaagagcgcggtctcgcacggcacgcgatgcggatctacgagcgtgcaactcgggcagtgtctgacgaggaccgcttcgagatgttcgaattctacatcacaaaatcggcctcgaacttcggtctcacatctaccagaccaatctacgagcgcgccgttgccgcgttgcccgatcaggaggcgaaagaaatgtgtctcaaattcgccgagatggagcgacgactcggcgagatcgaccgtgctcgcgcaatttatggccacgcgtctcaattctgcgatccccggacaaatgctcccttctggcggaagtgggaagaattcgaaatcaaccatggaaacgacgatactttcggcgaaatgattcgcatcaagcgaagtgtccaagctcaatacaagtatgtgacccctactactataaaaccgataacacgttttctaacattatccacagcaccgacgtcaatttcattgcatcgcaagccattgccaggagccagcaactccaaacaggggagcaaggcgaaggtgacgatgaccagcgacgcgcagatgccatggcagaattggagcgtcaagctcgtgccccagttggcttcgtggctgcctccagcggtccggaggggggtaaccgtcctccacctaccgcccaagaaccagctactgccgaggctaaccccgacgctattgatctcgacatggacgacgaatagagggagaagttgatatagggtattttgtcaagaggaagggaacatttgatgaagttttttcttttttactgactcgatttccgatatctttgttctttctgtgtctcattcatcgagttgtatgttgtatacctgctatctctatgcattctagtgtgaatgttttttttttgcggttgttcgccatctcagttcccttttctctgctcctaccacagcagactgcatctcaaatcatgacttgtctttccggttggttgttaaaacatgcagcttgcggctctccgagattttctgctcgattttaccatatttctgtttggatacctgattcaccgtggcgttctagtgttgtatctgtatttgtatagatttctcaaaggaatgattcaactgtgtggcagcttgttcagctcgacgtgttgtaactatgaaggtccattctattggcgaattctaagtcgaaccagccttgacattcacatatcataggtaaacagaaacattggtcgcacgcagcgccgatcataatcgatctatatctacatgtggaacatttgaccccggcgctattctgaggtaaatgtaaaaggaacaggggagccaagatattaagaaaaatacaccatacatccacggaaatggttcagtacttcttaggaggtactttcctctgcctcctgaggagtgtggctctcggtattagcatcctcctttccttcttcgccgtcctgctggggcgcaatatcttcgctcgtctgctctgtctcagtagccttctctgtctcatggggctgctctggggatgagacggcagagcgcggagcaggcgtttcaggctcgttcgcaacatcggggaagatctccaagaagagatcgggcaagaagcggccaaggcgtttgcgagtctcgacccatatttcctccttgcttgggtcttggggtggggacacaaggtagcctccatcagccattactaggaggatattcttcaagctttcggggactgcttctgcctacgagattgagaaaaaagaatttgttagatgggagtggtcatggtatacttgggtcgtcgggtagaataatcgacttaccagactatcgccctgaccactgttcatcatgcgatcaaggatgtccaggatcctgagccagagagggagcatacccgtccggttggggagctgatcgaggaagcgcaggaagatcttgcagaccaatgttgcggcttggaatcgggtctcgctcataccaacagggtcggagtggtagacctccggcttcaaaagaagtaggacgagcgggaataggacttcatcgaagatgctagtccactcctggtcatcgcttgagatcagttcggcagatagaagagatcgctgcagcgtggaaatagcatggtgtcggatatcgcgacacgggttgatgcattgactggtcaaggactggaagataggcgaccagtaggcagcccaggctagaaatgcacctattagaaactcgttgcagtagacatgtcagaggatcgatcgttaccttcattctcctcaagatgagattgtttgataagagccgggactcgtccagtcagatgatagatcagaccgattgccttgatgccgcgagtcacaacttggttctcactacggaaggagaagtaagtatcaacaatggacagaggtgcatggtacccttaccttgacttggattgtttgacccccttattccgacgggcctgagcatcccggtgtcgttcctcgatagaacccacacgcccggcgctgacgaagtcattggccaggctgactacgaactcatagttgtcggctgtgataatatcgggcattgactcaacaatgctttgtagaagatcaaagacaagagaagcgactgcctcgtgttgatggagtctttgcaagatcgaccagaaatccggagaaatagtgatctcgtttcttagacggcctgtatgagcaatgcacctagcaagacccttgaccgtcgccacggccacggtttccaaaatatcctggtcgaatccagaaatagcgtggagcacaacgggtacccggataaagtgttggtcctagcgtgggatcagtaaaggagaacctacatcaaagccacagggtaaaggagagtacatacatggctcagccgcaagagatttaggaggtaagaaacaacacgagacacggttagcggatggagattcttcgcatcgcgcaccagtgtttgaagagttgttgccaggttttcaccgagaacctccagggtcttttcgtcacgaagagtgagcaccgtcgccaactctagaacgaatatcatcgaaggatcgtatttaggttggttagggtcagctctgctgttggcaacccttgacgttggtgtcgggcgttcgggttttacgacaatgactgctggtgcgttctcctcgggaagcaacgacagcaaagcctccacgagcatttccaatgaggacagaggaagagatctgcggaagaagtcagtatcatgaccacaacccatcaatgaaacatctttactgacttaatatttgtcaaaatttcggatattgagcaggcagtcacacaatccactgtgcagagtgtgttgtcaagttcttcgtccgaaggctcaggaggatcgtctgccgcataacttgagaggtaagatgtgaatgcagacaaaattcccgtgtcgttgttgcgtccatcccgatcaatcacctgtgatggaggctgtagcggaattggagatatttcaagttcggacgtgagtttagcgtcaaacggcgggatgagagagttgatgaacaagttactcaatatgcggacgatatactcccagccttggttgacagttgactcatttgttgagaggactcggaaaagcaccacagttgccagttgtgctctgaagtctcggccaaatttgacggctagctcgcttaccatcacactcttctgaccaacctgaacctctgtgttgagcgctgtactaggaggtttgctagtacccaaagtgctaatcgatgcaagggagaagacgatacggtcgaacgcctccgtcaagccatagcgggcagcaatctgggcacactggtcgaaaccattgaccacgcgggaatatactgcatcatctgatgcagacatgaagacatatgagagggtcgcaatcactggtttccacgtagccgcgaacatttcggcatcatacatgttggtctctcccactatgacgtcgccggcagatgaagacttcagcaatagttccttccaagcatagtcaaatgcatgcttgttttcgtgttcatcgggtagaatgatttcgttattcttgatagagtcatagatatcctcgaggaattcctccgcgaagtctccacccccgttgacgcctcgcaagttccttgcaaagccagcgcaagtcatacggttttgtgacttcacgttgcggttgtagagatcggtgttcagcatgatgatggcgtaggtcaaaatgtatagtgcgtctttatcggcgatgccatccggcttgaccttttcaatgtaatgttccgaaaagatcgtcacaattcgctcaatgagcggcgattcaccaggcaaacggaatgaactgagtagttcccgaagagcttccactgcactacgtccctcgaagtcaaggagatccacaaatgcgcctagcaactcctcgttgccgcgtttggagatgtattctccgaggactttctttgacaggcgtgtggtgcccttcaagaagcgagcaaccagaacgggattattcgcgtcctcaataacaccatggctcacaaggaaggcaattcccttcttaggatcctcattgaacatctgtgcccccttgataatgagtttcttcgtgtggcgttgttttttcaagctttcttgaggaggataatctccttgtataggctcgttatccagccgatcatggatgaactgcacatagcccaaaagggaatcgagacataacgggggtacatttgtagtgctccaagttgcagagtctgggaaagcattgcgagagagcaatccaatcatatcctcgcacaggtcggctcggtccacgtcacaatcatagttgacaaaaagctcaaccataaagctaggtatgcgtgacaacatgccaatgctctctaccattgcctctcgagcttcgggccttcttgatcctccttcgagccccaatctctgtcgatctctaacaggaacaggtgtggctcgtccgctattgggctgcgaagctggctgtttcaccaactttggtgattcaggaattccttcgtagagcgatgggtcgatgccaggttctcgcggtatttccacgcgagggtgcaagcaggccactaaatatgaaagatagagttcctgctgtaatttcaaaactggccggcaggttgataacaaggtgccagctactctcaacgaaccagttagaatagctatgtgttctgacctgactagctgaaagaggtatcgacaaagatcgtccttagccagggcagccagactgggatgccgagcaatggaaggacctgctacttccaaggcaacatcaataattcggagtgccatcacacgcatggcgtctgtatgttgccggttatgagggtccaacaggtcgatcaagacacggaataattctttgatggatggtaaggagtagggctgaagctcggtttcgggatcatcatgcgggctaggtggtgcagtagctgctgcgataccatttcctgcctgctcgggtgatccctctcgactagtactatgacgttctgcggccgatgtgtctgcgctgatggctgacaggtgctgcgaagtcacggtgtctccattaaccgacgggtccatcttcagacgagagggtgggtccttttttgtatcttcgcccgcaaatggatccggtcctgcgggcactccttgatcaagatgcgatagacgcatgaagatcacctggcacattttgaccattgccatttcggcggatctccgaagtacctctgacagacgaccctggcagcacatgctcaaaccagtttccatcatctcacagacgctctcgtcgcccaaaagttcgccttcaggtcgtgaaagtatgccctccatcaacttcagaatcctcaaaaggactatctcgtccgccgacgagtcgctggcctcaaatcggcagtgtgtgatcgcggctgatagtagctgcatagctacagagagccgtggggaattcgggttgataatattgtacgagaggaacttggtaatggagaccaaggcgatagaggtaattgcggcggaggtcgaagaggagcgaacgacctgtaggaatggatgaagtaacgctggggtatcaaaagttcggatatctttgcaatctttcagatcactccgcagtcgtgtaaaggccgatattaatgggttgtcctgcatgctcttccccttcttccctcgcagaccccaccgattagccaggacatgatcttcatcgggacgaggtgacggttgaccagtcctgcgtggaattggacttgagggggcagagttatcccgctcataaacacgagaggctccattgccgcccaggatggcggagactgaggagtgagcccagcgtgcatgcttgcgcatagacgaggtgacggtgatacattcagtggtcaccaaagccaccgggtctatggcaattggaagagaagacgagtccatagtgggatcgagcatcacaaaagatgctcgctgttgtgacaccattttgaaggtcgaacgaaacagctggtctcttgatcatcatactgctgcttgccttatcgagcttagcgtcttccccgcccactcaccgcctacgacaggggctgtactgcacattaccacacaatctgtattaaactgattggactggatgaaaatctgcaccgatgcggtatcaatgtaccatctggtattagactgcatccatggatccaaaatgtttgatttcacctttgttgacatccttctatgccaattcaacactacatgccattatagtcagataatcgcagtataaaacgtgcaaatacgaggtaaaaagccaatcagaagcttcacctacatcatgtatgcatgaaatcatcaacatattaaaccggcgatcatcgatatagtggctgatatatttcccgagtaaacaaagatgagattttcgaattgactacggacattcttcatgaaacgagcgtattaaactgtctagaagataatggcattgtccctcagaccgaattagtattcccgtctattcttgtcctaaaatctaagcttatatacaaggatctgaaagcgtgaagaataaacaaggtgcgaagaaccccatatattcagcgaattatgcagatgtgacctgtcacactgatccttgcagcggttggggatcgcaacgatagcaacggtgttgatagcgttggccggacaaacatagtagagtaaacattaaaaacaagagtgcgggacaggtcgaagtagagaatgtaattcctacaacctaggacatcgggctaagctgggtatccatattcaagtcattcttttattcttttactattcttagcgtcaggcgctaatacccactcttggtctatcgggctatcgcgatatcaacccaccgcttctctgtccccgcgtctcaaaacaaacgcctcctctcgatcttacacttcatttacttaccttctggagattttcattcggatttacgccactgcacgtgcctactccctgaatctatgaattgagtggatatctttggtacctcagcttctatggaggggagcgcgaatgtcgcaatcgctttaccaacaacaggataacacatcctacatgcgattttcaactgtctctcactgctcagcataggaaattttctctcatttaattctaaacattacgatcttgtctttcccgtcactcgttatcttgctactccaacgttccttctgcgacaaaccccggcgcatttcatttgtttatcgcacacggtagcgcttgcccaacatcttctcgcattctgcacttgcattgcaagtgcaccaccattcgctatggcgactatcgcacctccctccggaatctgtacactggcggaccttcctctcgaacatctcagcctctatcacgtcgtcgacccatgtttatcatccatcttcgtcttctatggcgccgtctctaccgccaatgctacagtgagcagttcccgtattcaggcccatatattcacacccgccgggtttcaaagttaccctcggattacggtgtccccggctgcccccgtgtatgctgcggtcaaccacctaccccgcgaaaaacaaggtgatgaggtgtgtcgtggacttgcagtcagcatgctgagatattttgccgagctgtcggagccggtgaagcaccgtctgactggggtggctcgcactggaagaccgggaggaaaggtccccaagatgtttgatgagatgcatgctgcagatcttgccaaccgtatgacaaaggtggatgattctttggagattattcaggatattcggagcgcatatcaggaacgcaaggtaccatgggtcgacattgatgtggtgcttcctacgggtactatacaaccattccaacggcgagagagtatgggatcagatcttgagggaggtcagaatccgcagtatggtccatacacacccctgatagaggcgttgggagatcctatgtttttgccaacagctcgattgaagcgtgcgccgtcccagccgaccaatgtcagcaaatcacggctgttcgcaagaagccagaaagaagctcttcgtcttaccatgtgtgagcttgtggataccgaagagagatatgtcgccaaactttattctcttgtgcatgaagtggccgacgagtttcggcaaaaggccgtgggcagaggaccatccagcaacagccccgacgaggcagctttggcggcattattcccaccatgtttgaatgaaattctggaagtcaacctgggctttctcgatgtcattcgtcatgtgcttgatgaaacagagaaagatgccatcacagatattggtcaggacacggagctgccttctaatcgtcggggtttgccaagagatagatcggatccgcttggaattctggcattcgcaaaggccctctttgaatggctaccacaattttcacagccatatggagactacatgcgagcacatacaggcttcacgcaaactctgaattcgttcatgaaagataagaattctagcttttccaagagagtatacgaaacgggagagcagagactgcgctctctgttgatggaacccgtccagcgactacctcgatacagtctgctgattgacaccatgactagcaatctgcccttggtccatcctgccgtgcgaactctgctaaaagcacgagacattgtgaaggatatatgtgcgctagagaataattccccatcgagccacacccaaagccttcaacgcctccaagagctagtcaacggatggccagcgaaaacattccctgaaggtcggctgattactgcagtcgatttcaacgaaattacccagccgtaccgtctagacacacagtcatctggcagaagcagcacagggatcatgcttctttataagaactgcctagtccttctagagaaacccgccgaaagccggactacggcacgtggtctgctggctgatatcgacaatgcggccgcttcaaccaatgacatgtccatgtctttgccacaatccgaactccaggttgtgcaggtgctagactttcataacgtgcgttgtatgcaatccacgtgtggtcgaattttgttcgccgtgccaatttcagccaagtcctcaaaagaagagacaagctctgacctgcttgcattggaactggctggaacgtatgaaggaagagccaatcgactgatcgaagaaatatccaaggcgaagattgagggtcgattccccgagagtgaaagagaaggaggtaaatggacgctaagaagccctcccaccgggtctgcgagtaacgtgggaatactcgcctgtgtgtgcgaggacggtgaaagtgccgcgctcgaccagattcaggcatccccaatacgcattgtttttgatacatccaaggcgacctgcggtcaaatgttgagaggttccaaccttgaggtcatcatatcaatatctcctccaaatggagatcaatacagactagatatcgattctgtggttggatctgggtctacagatttgatcacggtggacacatttatttccactctttcgcgacgtcgtaagtgaccctcccttgagaattatatttcttgccactgacataagaaacaaagttcaatatttgctctcgcctctgcatagcgcccgaaacccagcattgacgaactcattggttcattctaattttgaaattcttcggtacatcgcgagcagcttaatcacgcaggtcaagtcttcacggggcttccggccaccttcgccgaccaaactaatctcaaacctgttggggggtagccgtgataatgtgcccactctcaaggggccagggtcggccactcttaccggcgaattcccaaaaatgcctccgccaagagtgaatctgtcgagatcgaacactctaccttcggcattcccaggaaaagacaaggacaaggacaaggaaaaggagaaagagaaagaggaaaccgggaacaggatatctgtcgttgggacatctgcctccaagggattggatactcagttcgggttgctggagcagacatttgcagcctatgtgctttctctgcagtctcggagtggaaacattctgggtcgaatgcttcgggtcagagatcacgttgaccgggcgccggtcaatgagctctacaatattttgctagaagacccgagcagaattcaggctgccgccgaagtgccagttgatacgctttttgtcgctttcgaaacctttttggcgaatgcttggagaacaagtatgggccccgtcttgagctcctcttctctgaaatggattcagagccagtttgacaccatgataccgcgggattttgatgagcaatttcggaaatttgtgacagacatgagcccgcaaaatagacgagctctagctgcgattattcgactacttgccgagctactcgatgcatctggaaatgacggagatcgcggtgctttgacgatggcatttgcggaggtactcaccgaagacggagatcctagccatcatgtctcccttttggaccgactggtcgaagactttgacaacctctttgaagaatttattcctgggggtacctcagtggaaggaacactgacctgcgatcaatcgaaatcacatgccaataccgggtcagtcggttccaattcttcctctttccggaaacgcttcggcttcggtatgtctagagatactccgaaaaatgaaggcgaaagcaaagtcgcagcaattctacggacattaagcaagaagcaaagcccagccggctcggagctcaatacgcccaagggttctttgatgcgctcaaagtcgactgatgtggactctcgtctgggcttccttcgccctacatcgcgcgatcgtcctacatcccgtgatcgccctacatctcgtgatcgccctatctctcgcggtagccctgcttctcgcgatcggcctttatcccgtgaccttccgtatcgtccgtacgggtttgcatctgaggagcaaatctcgaggccaggcactgggtacgacaacccaccctctctatcttctttccgaggattctctgaggatagcgtgcgaagaactcgcaaaaaaagaaggagctccctttcggatatacgaccactcacatcatcctcagatgcatccagtatctctccaactcaacagctccgcccgacgaccccttccagtcgccctcaaggagaagtggtaacgcccaccaaccagtccaggcctcagagcagttacataccaacaccacctatgcgtggtcagtcaccaatgcgttctaggccgccagcaaaatccgggtcaccgacgcgactaggatcacccattcgccgtctgtctccgccccgcccttcgacgccgagcaggaaggagaacattgatcccagggctccacagatggagcgtgcatttaagtccaggggcagtgtatcagaatcgccagccgatgagtcaaggaggagatcccaaacgtcaggcatcccccagcggattccgggccttcgggagcggccaagcagcaacgcttccgataccaagcgaccacaatcctcgtctggcttgcaaaaaccacagaaaccgcggatgcaaagcccacaaaaggttagtcacattctatttctttcgataatgagttgactgacatcccttagttacgcgatcgtgttcaactagaaaagagaacccaaaactctacccaattgggcctgaaggacgagctcacggagcttggtaacgaattacgttctctgaagctcacaccaccaaggaaacccaacgcaatgaacttggagtttgattttgaccgtacagacatcaatccacatgctgctaccgccgcgtcccttgaagctcgcatgcgcaatcttgaagcccgatttgagacagttactggggaatacaagtgccgcacatccgctctcgagcgagacctggagtcgtccttggttcttagcgagaagcgtgttaagaaattggacgagctttatcgtgaggcaagcgccgagaacgaggctctctatgatcggtttaataccgagctcagcaagattgcgaaggatgtccgattgggccacgcagaagacgcgttgaagtctcaactggcaagtgccctagacgagatcggccgagtgaagaaagaaaacttccgcttgaaacgagaagtcggaggtcttcgagcccagtcagctgccgctgcactgctgaaggcgagcgagcaatgaccaaatatacagcatcgagggcttgtcccaccatcattcctttcccatattccatacatggttactcaacaacctgacacctgtcacattatctttcctttcaccttgtaacttgataccgcacaaccctcttctactttccttggaacgcctattcatttgcatacatatcatgagcctttcttacttgtattcattcctatttcttgtcacccttcatactggcctatccgcacagatagccatttgaccatgcatgcatagctcaggagatcaagtttttacaaggcttgctttttgtgtgtctaagtgttgttgtcatgtacactaagcctcttcggcatctttacccaccggccagcccatcaggcatagtgcctcagtgtcaatcattttgtacatccactgccatttcagtttccagcgacagcgtagatgtaccacttccacctcgttgagagaagaatgcttagctgaatgaccggatagtcgatagtccaaagtcggcaatgccagtttttgccaaaccttctgacttggaggctttcctggcttagacacgatgccttcccttgataacacaggtaaagtaaagcgcaactgagcaggcgcttcagcagacaagagagccttgacgtgctcaaaagtcccgggcatttcctgtccggcagtaaaatccttatttgtttgccctcgcggcctcaaattagccgcatctttgcgtatccgttcgatatcaattttattgaacgggcgtatcgtaacaggaagacttatcagttcatctgctagttcgttgggatcacggtcgaccggaacgagacgaagccgcatccagtaccggttatcccacaaaacccacggagtaaaactgccactaggcgaaacgttgacttgggtcacggggtcacgatttttcatgaatggttgccgggatagcaaccagatattatcacccccgagccgtggatcgtgggactttccaagtctggaggcttcatttgggagacgctggaacagaacccccgctaccgtgaagccttttcttcgtttctcgtcattggacgtggcgcttgcgccatgagagccatctagaccggggaacacattgtgaactagtggctcatatctgcgtagcgagaaatggctatcggggaagggagagactagttctgtcatgcggcggagaacgatggtctggatctgccggattcgggaggctgataatgttgcgagttgcgggtccatcgatgctggggttttgtctaggaattgaatgaccgctgaccctgccttggggttgaaatctagcatccggcattgagatgagaggaggtagttggacagctcgtttgacctctgaaggaggtcttggcttgaccgaagtagggagaggatggattgtgattccagcgcacggggtagggagtttgaggtgcgaagactgcggatggcgttccggggagtgagggttgggtcgaaatttgttgggtcggagacgtaagggacttgatttttgtggcaggtctccagaagacttgttttggcgaaggagagtagaggtcggcagacgaatatgcccgggcttgccatttttacattggatatgagattggtgtgagtgttacctgttctagcggttgggtcgggagaagtgatgtgaccatgtgtctggttatagaatcggactttggcttgtggttttgtcggtcgttttatggggattgatgtagtcgaccagctttcagaagcaccgaagataccatggcattcggggattcgagcaacttcaggaatgccaccaagacctaagccagttgctccagccgagagccgcaaaatggtggtttcaatgttgtcatcttgatgatggcctaagagcaatgtttcgagttcgaactcataacaagctatgccaagggcttggaaacggagacgtcgtgcatgtgtctcaaaggcggatggcagaggccccgatgctccaggctttggcgacaattgattctgacttgagataatttcagaccagtctaaattaaggatatgtgttctgatgtctgttcaataatggttaaacaatcttctaagatgcaaacattccgacttggaacatacccatatcacgaagccagccagcaaccttttgtgcctccatagtgctttccggacgggaacgatgatctaccacaaaagcagtgacagaaatagctccagcaacatcataagattgctccagttgcttgcataggtatgctagagccatagagtcggcgccaccactgacagcgattcctaccatcccgcgcatcagctataagatcttgagacacaaacagcgagtctatatttttcaatatttaaagcttaccaaacttccgtggaagctgtagagtgtcattatcaccgggattctttccatacttggcgctgccataattgaggcgagcgcgtcgcgatctggaccacgcttgctggaaacaacgctggaacaaaaccggcgatattgatatattgccggccatgtctattctccattggaatcaaacatgggctcgaaaattcaatatcatcgtcgacctatagattcacttcacgcggaggagagagaaccttagggtgatctcgtcggctcggccaatcaatttttccgagaacgtgaccagacggcctttacacgaatacgtctccgagattttatcagttagtattttaaatagtgacaagtcatttttgagatgtttgggggaaatatgtcgggtttctgatgctgacagtggcgtaagtggtggttactgagttccatatgttgctcgcatctaacaatacgagatttagccggcccatgtccttttgtatagatatgttcgacggcggaaaaggggaggaaaagcctgaaatgtgcaaatgacgtttcaatatataaccttgtaagtgcgtgatcccgagatctcatacatcttcgactacagctcgacctcgaattcaccatctagaactagtcatggctaaagttgaatcctaacccctgagttgtagtgtaatccagggaactgggcaggcttaaacctgagttattacatgtagcagattacatatatagcaatcaaccgctagggtaacctctcgagatgatcataacaacaatcggaaccttcgataatccctgcagcggtatatatacgatgccctaacaacgttgactacagcgacttcaccacggcacgtgatatatatataccctgatcggacaaggacgggcttgttttgatgagaatctaccattctatctgttcctttaactatcgcttcgagggaagatcaataggagaagattacctctagttcgacgtttgatctttggaccaacgatccaggaactagtcattggcagacgccatccgattgatcaatcttaaccctggaagaatacatacattgataatgaattggaaatataagttagaaaaacaatttacatatatcaatttatttgcaacaactcttcccaatagtgggcgcttgtgaggtatctagacgacagaaacaggaagaggttacaggtacatcagccacagcaacggctatctccaactgcggcccaataatgcgtgcctcatcattccgacccagacgtatcaaacattcatggtagccctgcaaagcccatacgttattcggatgctgacgagcacgaataagagtgccatcaagacccaggtcagcctggtagacagccgctgcatcctcgacatggccctgctctagcaaaagagcagcgtatgcatggcgggtgggctgcatccagctccagggctcactgtagcccagcccatcgtccaattcaatcgagcgacgtagatgctcgaaggcctccgtgtagttcccacggcggtactcgatctcgccgtccagcatttctgacgccacccctaggatatcgatacacttgttgggccagtccaagcgcgtatccggcactcgatctcgcgctgcccggtacagctctcgctgacgctctgcatccggcacgttccctgttgctgcatatgccacgcccttggcgtagtgcagaaccgctatcgtcatgcagtacagctctggatctgaggggatggcaatcttgataatctcatcccacatgccgaaccgtatcatgatgtgcgcgcgcacagacatgaagatttcgatgtagtcggccatggccgagagcaattctttcggtaatgtcgcctccatgcggtccacagcggcaaatgcggcctgtttctggcccgcaaacatggccgcgtagatgagggagtggtaggtgtgcatgcggtagacggagtagaaattaaatgggcctttcagcgccaggtatttctcgtctgcaatcgcggcacgttggtttgcgcggacggcgcttcgatagtctcccaccagcacgtccagatgggacggcatatgattgatatggcccgcgtccggaaccagatcgcggaggtagtcggccggtcgcaggcctagttctggaaagggcgacatctcaataaggtgtatgtagatgtgcaggagaccggggtgtttggaggcgtccttatgtttgagagcggtctctagcaccttttttgcttccatggtacgggtgcccggatttggttttccggtcaccatgtcccacaacttccagggcgtgaggctgatcaaggaatcagcgtacaaagcgaccacgtccaaatcatcgctaaacttttcatatgcctctttcattgcatcggcatatgcaatattctgaatggcatattgatccatgctcgcaggcttatcactctgatagcgggcggagatggccttggcgagggcctgttccacggcgttcccattttttacagacaggaagcgagctttggttgcggctcgatatgtgttttccacgacggccgccaaatcgttgccgaggaagtcccagggctggttgtagttgggaccgagagagtaggccaacccccagtaggccatcacacataatggatcatgcaccaatgcctgtttgaaacagacgatggattccttatggttgaaggaatatgcccacacgagaccgcggtcaaaccatatttgggcctcaggactggtggtggtgatgaccttcccgtatgcccccagattatacggatattcgacctgggttgatccttttgtcatgttgctgatatatgccctggtgacaccgtatgatgttggcgggaaggtgaaggagagaatcttgacgagttcgggtttaggcggggttcccgctacttgtacccaacgacttcggacttgttccaatttattttatgttttatgttttatgtgatgctgtgaatctaatgaactattgaactattgtgaactatgcggtctatactgcatcttattggattcccagtcggaatgcaaatgcgattaggttgtactagattgtactattgttagtagatcaccatgtacagccattagaccacgagatatgattgcttttttctcttctttttattgattgattgatctctttgatctgaacagaaacaagagacgtgaaaactatatgcaaatcaagaatgtatggcagttcagcctcaatgttctgcaattcctattttccccgtcgcatcagcccacactttgatatatccccatttttttttcttcatcacatgttgcaccccaattaggaaagacgtctttttaatagaaagggagttcgtacttttgaaaccacctgctaagcctgtcacttggcttatttttgcagggatctctggccaaggcgtgaatacagggttagacacaatggcacatggttcggacgattccaggtatatatcgccacatcagagtagagaccccttatattaactacaaattaagttatgcacctcctcattgacatggcaaacgttagtcagcgcgctagcagtgacgtgggcccaataacacctcggcaggtgacattgctgagaaatcaaaggtggcagtcccaattttgggtataggctagaccgaactataagaaaaagcaaaataccattagctgacttgttgtcttgaagccgcaacaatgctagtggaaggatctccaagcctattttttgtcaaccaataagaacgaagttgtacattgccatcacagtgatctgcgaggtatatagaaaataggccaaataagccggctaaatgtgagatatcggcataataaagatgtgcattcctatttgagacatcttgcagatccgagccaatcctctgtcgtgcactctaggcagacgcttatcttgggtgtctttgatactcccgactactccgtatactttccccagacctttaaccttcctcttccctaccctcgaccgagaattcctgcctccaacaaccagacaccggactgcaacccccacgctcccccgtggaagagcccaaataccgaactacaacctaatcgcccgacatggcactgtcactgtcagcttcacttaaaacatccctactaaactgcggaaccttgatcagtgaaagactcgaagcagctccattccagaccttcctactcttggcatctgtgtggatactctctatcccgactcttgtgtttttgatgacccgctactggccctcgtttaactccaaaaaggccaaacctgaactgcgacgctcgcgcgagaacaccgatgccagtgagacccctgcggggacccctattcaaaccccgagtgagaataaggattgagtcatggggcgcaaaacgccacatgtaactacggggctaggtgggagcaacaccagttcgtcgatcgctctgtatcagccctgaactcggtagtctattttggatttcctggtgaatgggaattgttattggttgctctcatgcaagttcagtctaggttgttcccttcttctaagctaaactcatttaagaacaccttgcatgccgaaggcgggatttgccgtccacattatgcgggggatctacgggagtatatacaacaccggtctctgctttatatactttatattgttattccccgctttgacgatatcatgtcacgaatctttctgctatactctgtaccttaatcagaaataggaaaatgcagtataccaagtggctgtccgcagtcagaagaccttcattgccgggctttcattccctagaactggtatagtatcctccgtaagcttacccgatctacctgcctcattcagtgttatactccaacaggactcggccgagtcgaatacacaaaggaaaagcagccttcctcagcgcctctcaactagtgctggtccagtagtccaatcctacaaaggcaaccgtctcattagcacgagataggagtataccaagtaaaccccaacggtgccatgtctctcctccatgtgtgaatgtaacccaatgcacgcccagtttggagtaaacccgtcagcagaagacaccctccgcatgggattgcctcttcggtcaaggcattctcctcgacgaagtacttccttttgacagctcgagcagaatcccagatctataagaaccccgagaaagaacggagcaaagagagcctcctacccgaccataccaagcaatcatcagaatcatccaacagaaaccaaacacttctccagaatcttcttcaagatgctctccagcaccatcatcaccagccttatcctgggtctttcccagctaagcactggcattgcactgccctcaaccccacccccaaccccagaacccggcttcatcatcaaccacgtagcctccgactacttcccaaactcgaagggcgacctgagcgccttcgacgtggacgtccactacgtgggatattccagcgcgaccgaagcctggctcaccagcctggacccgcactcagccaccagcgacgaagagaaagcgcgcatcctgaccgaagccgcgtacgcgaagaaatacgacgagaacgacgccgacatggccggcgacgtggagtcgttgctcgcgcacgttgccgggaacgtcaccactactaccgcgggcattgcgaagcggtcgaccttctcgactagcgcggcgcatgctgtcctgtggagtgcgtgcggtacggtgttctcttgtattgctggtacgacttgtcagtttgatctgcagattaacagggccccgcgtagccgttgcgaggcgcagggtggctcgaactgctgtgttagttggtcgacttataatgtgcgggctgggttcttctcgagtacttggacggcttgcaatcaggaggttcaggccgagcataagattaatgcttcttgtgagggattcgggacttcggaccagggtggtgatgtttgtctaagcaatcgtgctactggatgtacctaggttgttgaggatgggaagttggggcagaggtggaggatgcagaggcgggggatgcagaggtggaggtggagaaagtggtgttgctataaggaacagggtgatggttgttcaagcttaggatcatgattatccatatgtagtcatggaatgcaattgttgccctttttcgagagccgtcaggatcatatctgatatgatcgttgcatcggggaaatgtgtaactacatagttagtaccccaagctctcttgggtgtccggttagtgcagctagtcaggggccattaacggagtttacaacagaataggctttgaaggatccattgattcgattcttcgccaatattgccgggaacaccggcaacattaatacatgagaatgcaagctgcaagattgaggcaaaagcaaggcccaaagctacagccaagtaagccagatgcgctaacacccagaagaagagaaacaggagatgtgatagacatcaaaaaaatcaagatcaaaatcgaaatcaaataactcgcccatatgtactacaaacccatgcatgtagcattcattgcattggggtaggctgaatatcaaatgtaaaatttgaagagaaggaaaaagaaaaaaaagaaaaaagaagccaacgaaaggtcccaaagactaggttttcattaggtgatagcagagcctgcgacagaggccgagttggtcacagaatggatactcccgggtggtgcatgtgcgtggctatccccgttcggaatgtgggtttcttccacaaggacatggttctcatcaattcccaggagagaccggggcgggtgaatctctttcttgccatttgtcttgtagtagagaaccatgtctccggaggtgcgccagaggtgcgtgcgaatcgttgctagagtcatgtttggtggacacagctggtggatgaagattagcatgattggcgacaataaaatataggagaaaagcttacagtcttctggcagtatagctcgagatactcctctggtggcataacggactccggttcatccgggttagcagggtcgatgcgctctgcgacataagcaagaaccttctttgctcggagcatgcggttggcattaagacgagagccattgttattagtgttcatatttcccggaggggcaccattgggagctggcctggatgaataacgagattagtttcatcaacaacacgcattccagaagatccaaaacatacgggtcgggtttgacgactggcggcaaggtatcatcgaaaggcttcaatacgaaggcgatcttgacctgctccttgaagggaatttgattctataacgaatgatcagtaagagaggaaagaaaatgcgagaaaatagacgtaccttcagaagaagctcaccgagccaatgaggaattgatttcttaaggctttcgaggtcttcaccaacgcggcccacggtacctctgtagagatccgaggcaacggcagtatcgccagtttcctcctggatgaagactgcagtccgggctgggatatccagtcgcggagtttcctcctcagaactaggagaaagagccgtctccaactctcgatctgtatttgtagccagaaattcttcataatcgtcacgaatgcggtcaacgacgccacagagattgggctcatagaccttctcttccttgatagaggagatctccgactcttcgaccttttcttctaatatctgaggcttcgtctccgtagaattgcgacccaacttcttggggaagttcatttggaacttttttccgaatagtgacttcttccgctcttccttatcaggctctgcgggggattgaggaactcctggagttgcatccgacggagacagaagagacttgccggtgtcggtttgttgggccgctagaggccttttcgagaagtagtcacttggtgaaaaggatgatgccccgccatcgacatgggaatttgttagccccgaggcatcaggtgtgtctggttcaaatgcggggaacggagagttgctctgcatggaagtgctcatgtagtttgacgatggtgtgccaacattgatgccaaagccgatgttcgggctaccagggaagtctgagctgggacgcagagtcgacatatgatgaggattcgatatcggaatcccaatgctgcgagggacatcatcgccagatatcgaggtagtcagcggattcagtcgagcattttcttctgctctcgcgatggcagtttggcggtaatcgttgtctcgtcggacttcctcgtctactaccagagcgaacagccagcgcaaaatccatttgccgagattgactgcgtgttgtcagtatggcaaagaatatccgccaaggttgacagtagagcagaataaatagtcgtaggaaatactcacttctttgatcatccctaaattgatacagctcagatagtggtagatcgatctcgtcggcataaacttctgcgtcgaaacagcgattgggctctagaatgactgagagcctgccagtgcgtacgttgatggcacaccaatgtccgatactatcaacggtgtttacctctgactcaacatcatccatatgacgcttgccgaaggtttggacaggaatacactagattcatgttagtcgatgtcttatacttctccggctgagatgctaaatcaccttcagcaggtcccagagaacaacttctcctgccgaatcctgagtaagtgtgcgcctccgatcattcaacatcaagcacttgatcaagccgtgttggccttcaatggtttcctcgggctgtgaatgaaccggaattgtcaggtcaattgtcgccaagttaggctccgaggaattaagtttaggggctgcgccaccaagaatcgaggtcgctgataactgcaaaagagcattatatggaaccttcttcggtcccttctctggggttgcgggctttgcagcagagtctatagtacgtgctgggtcgggggccggctcgatccccaccgtgatgtcaacatctcgccagcggttgatactagacttgggggtagctgtccagatgtagtctcccgccgccacaaccttgacaacgccctcgtgctcttgtagtgcggcgacgcagaggccctggtcgggatcggccgatcctcgcatgtcggtcttcgccaccaagccggaacggtcactcgagtagaagacagagagatcggggtggtccgagtaaagagaccacacgctatcattgtgcatggtcagggtgttcatgcatcgacccgctgtgagagaccagatcttgatcgtctggtcagacgaccccgtcataattgtgtcgccggactggttaatcataatagcacgaatgttgtccgtatggcccacgaacttcgtcacaagctttccagaccggggatcccatactcggacgacattctcagggccaccgctagcgagcaccgacgagaccgcacccagcgcatagacagagcctttacccgaggagtcttccccgccggcattgatgttcaatatctccccgccgccattcaaatcccagaggtaaaccttttgatcgagaccgcccgaggcaacccaagtagcctggctaccggggctcgctagggccttcacataatcggtatgttttccaatgcgctccgggacctcggttgactcggagtgtgggcgccagagtcgcacggtcgtgtcggacgaggccgaaacaagcgcggaattgtcctgtgccaagactatgtcgttgatccaatgactatgtgcttggacctgggttttgaagacggtcggacggggcttctggccaggagacgagagcgcagacgcagaggaaagaggaaagtcgagatcccaggaacagatgacaccgtcgcggcccgcggagtagctaggagaggggacgtcatattagtatccgtgcaatccacgtgtaaagaagcctgatttccggaagatcgcgatcgcaaacttggcacgggttcaaaactagatcatggatcccagcactagcataacgggggaaagatacttacaggatggagttctgacggtcgacagtcaagccattgacccccaaccggtgcccaccgggtgcatcaggcagagggaggactagagtgagagacacagtcagcgacgtgggggtggatacacaggatccaacataccgtaggtgaccctctggtgacttagtttgcgtgccatacatgcagcgttgaaggagtgaaaccaattgcggagatgcgaatgcggagcttatctgtcgaggccgatcgcacgttcagttttggtggggaaagtaaacgtcagagcattcgcgacgatcaaaagagagaaagtcaaaaggccaaggaaaaaagaagcgaaggggaaaacagtcaaatgaggggaagttcagagttggaggcgccaggggtccggagtttatgtgtttatgtgtttggccttcctatgtgatatccaatacgaccttcaagtagaaatcatgagattactcgtctttctccattatttaatagcccgggggcctttcctttccctttctggaatgcttctcggttattttaacgatttgactacatctataagttccatagtcttctatgataccagatatactttttaacaagatacacaatacataactatatattatgcacatccacaagactcctcgtttagaggaacaatccttcagccctaccaatggggtactgacttgcccgctccgaatggtttgacacccggagatcagatttgcgctcagtctagtcaattggatgctccactcgtctcgtatggaatgagacttaagctcgtgcagaacatacggatagagcagcttggctgcatcgccaagatagggcttggtttggggcttcgagaaggctgcagctcgtatagatttgcagaacatctcacaccctaaagctatacgcgtcattctccgtaattgcacgaatgctcatctgattccagaatttcagctatctataagccagtgcagtgggttgaagggtgtaagtatacacaatataaggcttcttttatgttaccgatgagcctgacttcttcgctgattagccaggaacgtctagtccatcttatagatgtgcatctttgattcacgagtcgccaagggcgttgccccaagccttgagcttgcaggccatgatttcctgcgcaaaagggagatggaagaactattagctgtcgagcaaatcccggaattgggctgcttcaagccgagagcagtccgagcaagtaagaagaatgacatataattgctcaaacaactcgcttcccagaatctacagaatctatgctcttccaaccttctatatagcaaaaatatacaaactacaaggccaagaaaaatccaatcaaagacttttctccgcctgtgccgcctggcgtccctcaagagtattcgaagcatattgatagctcccaaggaaaacagccccaccaataccaatccacgtcacacgcggcgtgataccacgccagaaagcaccgggcccttcacgtgcaatgccgcgcacaatctccttaacacgaacaggcgcgtcaacgccacgccgcgcaagcataacccgcgtcttgatcacgtctagcggggtagttaggccagccgcaatggcgccggcaacactgccgaacatggcgcttgtggtagcgggaatctgcgtctcggcgagagacgaggccgtctccgcggttcgcaggtaccgcttgccgtaagcttccttcattgactcccacattgtgaactgcagcacggtgaaggggatctcgcgggcgattgtgatgcccgcgccgcggtagagctcgcggaagacctggctgtagccgcgcttcggtgctggggccgagggcgctgtggttgtacttgttgggaccgcgtgccgcagggacaggatgtccttcagtgcaaggagactcgagccgccgaagaggccggcttgggcacgctgcttaatgacttctgttgggacgcggacggcgcatgcggcgatttcgccgagggaggaggcgagtgagtgtgtgaggattatgtgggagcgggattgggagttagttttgctgttggcagattgaggtacgagcagagtccgcttgacgctatcgtagacgatgaagaaggaggcggcggagggggcagagccaaagaggacagatgggaggccggcatagataccgcggaaggtttggcggagggagacacgggtttggggtgcggtgtggtcgcgtgctttttggagtcgggttttgatggtgtcgagagggtagagagagcagtcgacggttaagcctgcaatcgcgccggactatatagtagagctgttagagggatactcccggagagagctctggagaagcttacaattaatgaccgcgtccacagggaggagaccaatggctccccgtcaggttgggccatttttgaatagaattggatatgaagatggttctatcacaagaacatggccaattggttggaaaagtaggaagggagaacggcaacgacgtaggttgtacagcagcgtaaacggagaagctccgcggatatggctggcagtttcttttgctccgcggtcaggccatccgatatcgccgatcttcgctacgtccacttcaaaagaatttatactatcgtagggtcgacgtttggattgaaatgtatttactattgaagaaaataaagctctttcgcacaagcgtggggcattgacaaaagaatacccccaaaaaaacacgcactgagacatcccacaccaagtctatcagtaccatccatcgtcaagccagagccagtgctccgttttccctcaacatcttcacaagagaaactcgagcgcgataaaatgtcacagaattttattgaagaatatcaactcatctcaaccatggccgggggaatgagggaaaccgccaaatcatctacaatactcgtagggaatcacacactgaacgcggaagggaaggggacaaaagtgccaccccgttctcaaaggataaaggggatatatagacacgaggagaagttgatacaaagaagggatattatttggccctggcagctttgctggccacggcaggggtctgggcggggggctcgaggacgtgggtgtggccgggggcattgataatttcaccagtcacgtcctgtcggcaggcctgaatgttctttacccagtcatccgccaggacctcgtcgagagtcgctcggtttttcgggttggtcttcagcatgcggccaatgatgtaccggctttcccgcggcaagatccggagaagtcgccatgggcccttgatgacctcttggcgctgcccagaaggctgggttgatgtctgaaccggcggtgcctctttgctggtcgttcgggtgggccgatcatgggcgcagttgctggtttggctgatctgcttttgagcagtatcgggaggatcatcctccctctggagggggggttctaatttctttgcttctgcatcttcaggtccgtttccattttggtccgttccagactgatcaggtccgctcgagcgaggggtcaaacgcttattgtcctgggcttgggaaagaagatctggtgtcgacttgggccgacggcgtggctccggttcaggaaccggggtgcctggggtcgggctggaaacgaacagcttgtatgagttgtcggtcaggcgcggttgcttccatgggaaccggcgcaaggtcatacagcagaagatgatcgccagcgaccagacatccgtggggcgagggtcatatttcttctcgtcgtagacctcgggagcaaggtaaggatcagagccaacgatacctggtcatgcaaatcaataaccaccaacggcgaacaaaaaagatacaggattacttacctgaagcagggacaatgtcgttctcaaaaggatagcggaatacgacggcacttccgaaatcaataattttcatgatgccacggtcgttcaccaccacgttatccagtttcagatcccgatgggccagacccatgccatggatgtacgccacaccgctcagaatctgcttgaaagagcaggcgatctcctccttgcccattttgccggtcatcacgatggcaaacagatcgaacggcgcatattccatgacctcataccagcgactgccttcttgaatgatatccaaggtctcgatgatattgccatggtgcaaggtggagccaatacagaactctgcagtcaccttcttggagtattccttcaagctctcccagttgtgacggtctcggaattgcttgactgcaaaggtgacaccgtcactgttgcgcttcaagagacgcaccgagccaccagctccagatccgagcactctgcccagctttccatacttggaattcagaccgtgatcatcggcaaagggaacattttcggtagccatttgatacggagtggactttccagctgatggactcgactttttaggcatcgatgtcggggactcggatcgcttgttgcgatggcccatcttgaagaatcgtttcaattcagacatagagccatgatgctggtggccgtggtgcttatcgctaccgtgctccttcttacttccaaatatgctccgcttgtcactaggtttgctgagatcactcgcgctactggatcggggagccgagggacgaaatgaccgtttgacatcccgaccgctgaagataaagcgaggatccaactgggcaaggtttttggactggggtggtcgcttatggcgcgcatatggatcattaggttcgcccacaggggtcatagtcactggcggagtaagagactcctgtggagtcgaagggggactttcatcttggggggtgctcccgtcattcccgacgaagaattgcgcacgatttttgggtacttggatagcatgaggagctcgctctgagccttcactttttctggtaggctcggtggactgagggcgggaggatgagctgggttgaggcgtgctgttcttttcggttgatccgactggaggtgacgcttcaggggtgaaattagtgtccgcgtggggtcggctggtagctctcagagaagaactgtcgctggttcggccttcgcgagaatgggttgcagctggagtaagagggggtgactgtacagcagaggttggaggagacggacgcggcgaggcaaaggcaccggtgccatgtccactacgatcactcgactcgcgagatgcaacctatgaggatccaaggttagtatgatgacgatattgccacagtccattgagtctccactcagcggcgtcggattgtgggaagtgaatatcactttaagcttgaagggattggaagactcggaagaacacccgacaccaaaaaagagagatagatatggacataccctggaggaaggaagagacatggggtcaaaggagaagttccgcaggcgggactcctgaagctgtgcgccctgcatactcatcgccagcgaccgtaattgttcctcgtccgtaggtcgcctttggtctggctggtctggttgctctggttgctctgatacaggggacaaatctgatcgacctggttcaatctcctccgcgatggaggagaaacggacttggttaggctgagctcttgacttggcatcggcgtcaccgggttccgaggcctggccggggatcttcgcggggttgtgcatactttgggattctagagaggtagacgtgcgtcagacggttggcagggatatgggagacaccatcacaaccgatcaacacggcagccaagacatacctgaacccatggggttggtgggtgttggatcagtcatttcagacgtcatagtgttcgcagttcggcccggaacgtgggacacatgcccctcacggtgggtgagttggagaatcctagatagcgaactgaaaaccagttcaaaagctgtcaaatgtggtcaaatccgcagaattggacggtttcctcccaaacagagcctaaggagtcaaagaccgacgcaagaggcaaatcttttccctttttaacttttttttcttccgccgaatgcgatcgagagcacccgggtctggttcaggaatccgggaatccgggtatcccgggtctaaacgagaagatatgagaagcggagatggttgagggaagaggcaaaggaagtaaaagagaaagagaagaggggagatgtcagggtctgggcctcaggcaaacctgggattttgggggcgagtggggtgggagggagggaggaagacgacgaagaagagagatagtgagggagtggtagtttgtctgtctttgacctcatttactgcatttaatgccctttttttcgtttggcctatttccaatttaccagatgagcacgataatatgtcaaatataccccatatttacccaaactgtccttgaaatgccttacctcataagtcggatggccgcggagagttcaagatgatgtcgacccgtgccgacttcccggaggcgctgaccagacgctgaccaggccctacgtactcccaagccttgctacgacgtatggagtactcatgttgtacatcggtaccctctgcaggccactggacgatgggtctttggatctggaatattgcctgaacgggcttagtatatctgctgactccactagattccctttcctctccgacatcgtaaagggccaggccgtctttctccgctagattctccagactccatgccaagtagcatgtcgacattatgcagtgacacattcagggtctacgaagtcacacacatgccaagttctccgctccgcagatcagttggagtctgtgacctcatctgtaggcttccggtcacttctcttggttgtccagtcatcgccgagaagaggtccacgggaaaaccggggagggtcttagtaggcgtgtgatcacatgtcagcccatttcaattgcattgtggtgattagttggtctatatttgactttataagtcactcttgccgccgcttgcgtacggagtagtatatagctttcaatgtaaatatctcttggatttcaacagatatagacaatctggaaaaaaataataatcggtatcgtacaacgggggaagaagaaaccccaaatttcccagaaaacgcccggtaaaccgatccaaatcaaaacaagcaggccccctggagcactgtcggaatgaccaataattatacaagtctattgtccttgtgatgctcagggaacgacctggataccaatggacttggcctgggacatgacactcttgcacaatccctccagggacaagcctgataaccgcgtctcggtctgcttaagcttggcgatctcataaacgtgcttgagggagatcttgccacaaacatcgtggccaggattcatcgcaccacgcagccggttcttccggggttcgacattggccgcgttgagcaggaggtaagtggtggtcggggtgcgcagttcaaaggagaaggatcggtcggggcggaccgtgacacgcgcagggatcgggacaccggtgttgatgtgagctgtacgggcattgaattcctagagaagtagttaatatacatgaacggttcatataaaccgagtaaacaaagactaaccttgcaaaagtccatggacttgacacctttacttcccagagccggtccaacaggcggactgggactggcctgaccagctccaacgatgagcttcacaaactgatccttggacaatacgtttcgtgccatgatgagaagatgtcgagatggtttccaaaggccacaagcagagaagatcgaactcggaagatttgcagatttgcagattttcagccgacgacgctgattggccagagcgggaagcgagcacaagaaaccccaacgtcataaggtacactcctttctctcctcatcagaagcttctttggcttctaatcgattcatctaaccatcttcatctcgacattcacgatatctagattcaatctctattctcatccgttggatcgaatatctggtgtatctttctcatccggagagtcccattgacatccgaactagaactctcgggccccgcgcgtcgatcttcccttcacctcccttttccttcttctttcttctccagtttttattaattccaaacttatcgaaataatgaactggttaaagtcgacgtacgttccgatcgactcttctctgttgtggttacactgaccgattccatgcggacagtctctccgccgtggtgggcactgaggagcctatctatggcccagaggctatccagtctgttgcgaagcagggcgagaccactcccttctccgatgtgaacaaggagattctgcgctggcgcgcacactcttataccaatgtcgaaacccagaccttttacatcatggccgacaacgggacagtggttttccttcaggttatctacagcaacattgtgtaaggaacactcagccggagcttgaagcttccaccatgaaatgaagacctacagcggctgactctaatccttgatcttgattatagtggaattcacaccaccgcccagttcaacgtcaagattttcgacctcagcggaaagggcgacaacaagtggttctcggacccgctctctaacttcatgttcgacgagaacatgatttctttcggtgccgacaacctgtcgctgaccctcaacgaggagggcgactcctactctatcaagtccaccgtcaacggcggcgccctagtggacatcaagttctcccggactgcacccggtttcgtcgtcggcaaggacggtacctcatactttggaaccgaccccgataagccatggggctccatgcgccacgctttctggccccgttgtgccgccgaaggcactattaccaccaaggacaagacctacgacatgactggtcgtggtctcttcatcatggccctgcagggcatgaagcctcaccacgctggtaagaagccctatacatagactgacaaccagaaccgctttatgctaacaaacacacagccgcccgctggaacttcattaacttccagacccctacctactccgccgtcatgatggagtacaccactcccccctcctacggctccaccaccgtcaacgtcggtggtattgtcaaggatggcaaggtaatctatgtcggcacaaacaacacagtgactcacacagaaaccggccacgacgagggcagtgactggcccgcgcccaaggccatcaagtgggagtggagcggcaagacaaccgacgacaaggagctcacagccgaagtcagcggcggcctcggttcgcgattggatcgcatcgacgtcatggccgaggtgccaggcttcattaagagcattgctggcagtgttgccggtactcggccgtacatcttccaggtatgtcccatcttaccctcgtcttgtttattatcaagatagttatagctaactctccttgtacagtactcgcctcaggacaagctgtccttgaagctgaagatcggcgatgaggagatcaccgaggagggaactatgttctccgagtcgactttcatctcgtaaaggtcgcccgcctaattcgcgtacatagtacctcattctcccctgcgggacttgattgttggcgttcgttgtgatggttttcgtgatgccctcatttatgtctagaggatcggtttgactgcttcttcccttatgcggaccagataatccacagactgtatacatgatacttaatgctattttgaccatatcctgaaaatatattagtagtctgtagatacgtaatgaggtgaagagtacactcgagtttcatagggcatagtgatagaatacatgtaggatgtaagtaggcgaaagttactgtgatgtacaggcaagatcagacgttcccggtgctgaccaagaggaaaatgtacaaagaaagatacaaagtcgaatacaatacaattgaactcagaacaagaaatagaaatagaaatccgccagcggtgctagtagaacaagaatacaacccttctaggaactctagaaaaagagttaaacaaaaagaggtacaaatcaggcatcgaccatcaactgctctccttcatcaagaagagtcgtaacccgcgagagatcagaaatcatcttacggccatggccgaccaacaagagcttctcggcattggcagggagacccaggtaggtagggggttcacgctccggcagattgttaacccagacgacgaactcgcgcatgctagtggtctccggcagcgtcaaaagattgtcgttctctacacccgagacgagcttgtagccatcttcgaaggcggcgggtgtaaggaagctattgaccaggttctcgagctgctggtaatcgcctgcgtcgtcgattttaccaccgtacatctctgcgacaagagtgcggatcatctcccagggaatcttctgcggagccacgttggaacggccttgggacactgaatcgacccagtagtcaatgatgtgggctgagcactcgtactgaggggaaaatgttagcgtctctatggggaataaatggatgtagggtacttacgtcgctgtcgttgaactcccagaagcccttccatccaaggcttggtgcatagcggagcctttcctggacgacggcgtgcaagaagcagagtaagagatagacacgggccttttcgactggaggcttgctggctctcacactcagcgaagagagggaatccttcatgttggcacgcacacccgcgggctgttcgtacatcagcacacgcgaggcccggatcaaattgacagggatcttagggctggactccatagataggaaaagacggaattccttgtgtggtttgagagaatccagtctcttctcgagactttgcagccaagcaggcgccaggtggacgttcttgaccagcacccagttaccgactgcagctgcgttgctgatggccttgtccgcgctttcgagaccttcgttagatcccatggcaatgttggcgcaggttgcgcgggtggcttcaacaagagcgtcgaccttgtaactggcatcgaagccagggctggagctgagcgcgatgggcctggttgcagtgacctggtcaactacatcctttaggtcggcaccaccctcgaacagctcgcggccgaacaccgcctcgacgaaacgctcggcactgggaacaaatcggtccatgcggcaaatcttgacaaggagcaaggaccgaagcagttgatccagttgcgacacactctcgtcccacataaccgggaccacgttctctgcaagctcctcgccgaagaaacgatcccactgttcttgggtgacgtttggaatatgctctttgaagagggacatgttggccagcctcgtcatcacttggtcgcgagtgtccacagaagttgaaagatccgcgtcctccactgtctcatccaggacgcggtcgagaatggtcctgtccatggggaatggggtagcttgagcaagcagaatggcaagtgtgatgcgatccttttgaacgagaccaagggaggttcgcttataggtgttgatgaacaagtccctaacaataatctggacacgcgcagcatgatccttctcctgagcaaggcgtttgttctggtagagaacagaattgaaaatatcgacgaaatactgcagagagaactggtagaagtgattgatgtggtgaagttgttctagaaccgcaaagacggcactgcaggaacgggcaatgatgctgtagttctgcgtaacgttgtccacctcgagcataacaccttcggtttgatccatcttcagagaaatctcggcagcctcctttttgagagtttcaagagtttcaatgacattgtcatcatcgagaatgttaccacgggactcgttgagcgcctgcaaaagacgcttctcgagttgtctaaggtggaccttgaactctccttgcatcttgacaaggttgttgcgacgttcatcgacatcgggccgctcgaatttcaggacatcattcaaagactgtgtttgcaagctgctctgggtgacagtgaagttgacgaaggtagttcgactgcaaatatccggcgggaatgtggcagatggatcccgggtggataggaagagcttgaaggatggcgagaaatcgatttcttgcttgcccaattgaatgaggacacgaccaccagttttctggtattccttgttgagaacgtgattgagaatcgggtccagatgctcggcatcctggataaggatggggtttccgaaacgcaacgcgctctccaattgcttgacaaaggaatcgtccaagaagctcgtgacagtgagtttgcgatctttgctttccttctgtaaaaattctgtaatacggccagagggatcaacaataagcgggtatctgttgaatctcttgagaatgatggcgttctctgtgcaaagatcgtcaacgggaagagaatgactctgccaggtcaagcgttcatcggcattagacaagtattccgttatgggattgtgaggcttgaattgaatgccagatgccgccagttggtggacccagtcctcagccattgccttacggaattgctgatcgtaaagaccagcatatgcaaggaatgcagctgcaatgagaacatcgccaacgagagtgctgatctgagtttcgaatgacttgctcccttcttcccagcgcccacgctcagaggacaaactatcaagcaaacgaacactgcggtcgaccttgaattgaacccgattcatctcggtcttgattgcctgcgtctcgctgataagggcagcgtactcggccttgtaggtggcgatgctagtttcgaggtcattgatggtattttcgatggcctgagcttcggccttggtttgcagggcctgctcctcaagttgatccacctcttcacgtagagggccaacacgatcaaggatcgcagagtagttgacctgggcttcaacccattgcactaaaggaccgcaggccttactggcacggttaactcgctcataggtgaagtcttccttcgacaggaattcattctgcatcttagtacggtgtctgcgcgtcatctggcgctcattgtcgtagttaacgatgctggcgatgaaatcatcccgacgaatgagaccttggattgttttccaactatcgacggtgtgtccgaggagtgtgcatacggcttccagggcaagtcggacgctagccggagggttacccatggaccgaacttccgtgaggtgttgacgtttaatgttgctgacactcttctgggcttccaggacagcgggttcagcccgggccaaatcgttcaacacgacttctttccgagttgccacttccttctcttgtatctctaacgcggcctgcacttccaatgaaacgtgcttccgctgttctgcttcttgctgatcagcgaccatacgctgcaatttatcgttcgcttccgtatccttcttctccaattgtgtcttcttctgtgcgagactagctcgaaggtcgctcactttgtcgacggtgtcatgaagcttttcgagaccaatgttcaagtgacgttgttgctcctcgagatcctcgcgcttctcgttgaaaagcttgacatactgcgcaacaaagtcgagataatggcgaggggtgaggaaagtcgtccggccctgttgtttgtggagccgcccattgaagcgatgcaaggagtggtgaataaacaccatggaattgacaacagtgtctctgtgtgatgctgggagagtcaactcgcggtatgctactgggatgctatcaggcgagatgaagtttggtttgtctagatcgaccgattgagtgagctcggagccaacttggaacaaggcttggtcagaccagtcacccatccagttcaggacacaacgattgaacaaggcgggactagtagctgcttttgaagatagaccctcctctggcgggttcatggtaaagacaacgtgcaggttcttaacgatttgcgaggtgaaccacttgtacagctcctcctgcgaatctaggagcaagccttgacgctgggcaccctctttacaagcagtcatcaatgaggagaattcgtcgccctcaaagagaccagggacttctgcgtttgcaagcaaagtattcatgcgttccaggaatccagagtcaagaacgtttgattcatccatgacaaagcaaatcttttcgcctttgcatcctgcccggcgaagaacgctgcgaagatcgtcatcgaaatcttccgaagagtacttcccgtgtaccttgatctggaagaccttcaaaccattcatccaagcgacgaagcgagacagagttgtctttccacttccactcacaccgataagaatgagatgaccttgaggctggcggaagactcgatcgatgcgtagcgcgtgctcaaggacatcgttgaacaacacaagcggaacatccacctcttcttcgcagaaggttcttagacgtgccttcacgaattcacgcagactctcctgttcgacaggcacgtagttcttggacagccagttggagaacaggataggacccttcaatgcttcttgttcatcgattgaagggaaatgttccaaggcaatgcggcgaacagcatctgccgtccaagctctctcatcttcatccacgagtctgtcctggaatagacgcagggcttcgtgcgcccaaatgcggaccaggccttcaacagaaagggtttccaatggcttgatggcctcatacagaccccgaacccatctagtgagctcacgaggcgagtaaacgtagtggggctggatttggggcgtgaagcgggtttgggattcgaggtagaactgaaccatggccctggtgagggcctcggagtatccacgcagcaacggaaggatcttaagcacagcagagttgaacgtgccatagatttggttgagagagatctcgccggggtagtcgaccatgatcaggggagcatgacgcaggaatctctcagccatcggtgtacgaccagcatccgtaggaggattacaggcaccaacaaattgaatgcgatccagggtgacccaggtcttgtcggtggttcgccagaagccattctgctccacaagttggcgcaggaatgagatggcacgctgagtgccgtagcgatcaggggccggaagattgatctcgtcgcagaaaatgacaagccagcggccgatctggttcggagacatcaccacaccattaagagtcttcttgtactcacagtactgctcaaaggtcttgatcaggaggtcaggtgtggtggcactcgagaagttgagaccaacgacctccatgttcgggagctttcggagcgcggcgaacaatgtcatggtcttaccggatccaggaggaccgcagagcaacaaaggcttatgctcagcaagccacgagtacaacacatcttcatgacggatagtatcgaccgtggggataatgacatcggtttgagtgacggaatgtgtgttgatatcaatcgtgggcacctgtgaatgccaactagtccagtcagacttgggaagaagaacgtcatagtcaatcaaagatgaatcgccgtccggtggaagatcgatagtagacattccagtgatgtattttccgaactccttgcgatcacttagtggacaatcaccggtaagagaccagaccagcgtcagaagaagcttcttggacatgtaggactcaatctgttcagagtccagagggaagtctggatgctggacattgtattcgaggacgtttcggcaggccttgttcaacaagctgaagagagtgttgagggcgcggatatccgtgaactccatgatatggttgtatttctttgcttccaccaaagctctgagaaccaggtcatcaacctccaagaactgtttgaggattgttgcaactgtgtcctgggcatcctgtgtccggattactgctgtccctgcgggagcactgtcttcatccaggtcctcgaatgtctttgtcctgaggctttcgacgtagttggaaatcatcatggttggagtaacagtgtcggcattgaaccacaccataccgcaacgactgactgtggcaagcgtggcatacttcaagctttcaacttcaaacatgatgcgaacatttgaaggtaggttgagacgctctccattgggaagggtgaggagtttgttgtcatctagaacactgttcaggttctcaacccattcagggtcaacatctccgtcgaaaacaatccaatggcgtttgctatcctcgcctcggaggttgtctacgatctttctcagaattccagtgaagagaccgtctgtccattcacgggtagtgctgtcaaggttaccatagagagattccttagacatgaccttagagtcgatgatgtgagagacgccctcaacgccctcaatgcgctgcatcgcttgcagtaaaatcttccaggcagttgatttaccggctcctgacttaccaaccatcataacaccatggtggatgcattgaatttgatagagttgcagtgccttggtgatccacatctcactgtcgacgagatgttgctctttggtagcaatatcacggatcgcttgggtgagtttctcgaagttggcaggcacataatccacgccagcgaagtcttccacctggatttccagcatgatttccacatcttctcgaataagcttaggagcaattgtctcccggagactttgaacaatgatttgaggttcaatgacatcctcggggcctagatctccctcggtactggccagacgcgcgcgcttgagaccgcctgagctaacaagaacactcttcaatgcacggagaccgaagtcgtaatgagcctgcttggacagtcgggaagcacagtggtcgaagaaggggactgtctgcttggagagagacttggcctgcttgaaaccttgcgagaaaagcatcacttcagcaatcagttccttatccggtttggacatggcaacactgcggaacagcttcttcaagttgtctggcaaattggaacgaccagcgtagccagggttcatggtaatgaaaattccggtgttggagttcacagcgagtcgtcttcctacgagttcaatttgggccttgtcgccatctccgccagttttcagaccaatctggatgttctggatctgctgagagacggccgacaaaatacgttcttccagacggttgaactcgtcaaagcaaccccacgctccaacctgacagataccgaggaaaattcgacccattgcttggaaatcgaatgtgtcgtcacaacagaagacgagggtgaaacgaccgagttgcaggcccaatgccttgactgactcggttttaccggtaccagcagggccatatggcgaaccacccagtctctggcaaagagcctgagtaagggtgaggaaacaacgatctgtgagaggcgtgcggacaagacgctcaggcacacctaaatactcgaatccataggcgagcttcgcgttggccatgtggacatataggcgctccaagaaatcgcccgaatcgtggaagacataacgcatctggagaagccaatggtagtgagttggcgttgtggcattgagacttatgagcttggagatgcagtcgcgctggtgaacgaattccgtgatcatatgctcacacttcttgcgagtgatcggatcgagttcaccaagcaccgtcgcagccagcaactcgagaatccgaacttcggaaccgtgcaacgcagggagggttgcacctccttcctccaaggaatgttgcactgcgttggtccaagtgacctgactggcgaggaccacaatctgagcagggtagttagacaagaagtcattgaaagccgttcggtccacatcgctgctatggtaaagaactccaaattgttcaacggcctcgccgagaagttctgctagagtcaacttcatgctgttctctagcgcggagagccaatcattaatacgaggagtcttgaggaggttaacctctttcttcaaacggacttcttcgccctccttggaggtaaatgcaacaatattgttatcgtcatccatgacaaggcctgacatcccagcgaacatcttcttgaaatgcttggcgacacggaagatatcattgctgttaccaatgatctccaacaagtcctcatctccaacaaagtaaaagcgaggaaatgagacacgttcacgctccaaatattcaccgagtgccttttggattttgttcagcaaatcagccagtctctccaaggacttttgaacatctacaattgcgagaatatccaaaacgaacggagatttgtacaccttcttcatgacagtaaagaattccgagttgatattctggaaacggcccgactccaaaggaagaagatgcttgatgtctgcgttgccggtaaagacgccttccaggtagacccattgtcgctggacgtcgatccatacgtcgaaaaggacatggactcggttcagtttatcttcccatgatgtagcttcttcttcaaattctttgtagtacggagaatgtctcatggcctggagggagttcagattttcgctgcacttggcgaacaggtcgtcaaagccttttatcagacggcatttgttctggtagtgtactaggtccagagaatagttctgccatgtctcccgaacagacttcaggaattcctccaatgccatctcaccctgtgcctgtgcaatgatagcacgaatgatggaatcgcttgatgcgagttgtaaatcccagacatcaccaagggtcaaagagacaagagagaaacgcttgtcgggtttaagactcttgtatattttgtgccaatgtctttccttgacggcttcggatttcatgtctgacaaaagtgagttgactttcagcagctgccgaagaacattctgaatgtgttcaaaggcagcatactgtctcatgcgactgggcatctccttggtcattttgatcaagttgtcaagagactgtcggagcttcctaggttgcacgctggtccacagcccatcgcgaaggtcattaagactgttccagattgttgctagagcagcccagacagacatgaagtcttggacctcctcgaggatggggggaagtgatgactcggaacttgggggaagatcgagagcttccttggcctttgagaccatctcaaactcagactggagagcctcgaggcgagactggaaagagctcagggtgcgagatgcttcctcgggtggaatagtgccagagaccggcttctcatcattccatttaccgataacttcggcaatcttgccggcaatgacgtggtcttcagcgctaatctttgcacgcaaggcttcggtttgctcgttgacaattttgctcttgcggctaagcagctcgttaagggctgcccattcaccatcaacattctcaacgtgaagccagtcatacgggaactggtaacgttggcgggcgagtgtggtttggccttgacggaagaggtcaacctcgggctcccagactcgagtcttccgcttgcactgctgaacaatggtaatgaaagacacggcatgcgccgttgaagaggcctctagggtttggccttccaagtcccttcgggcagcagcaatctcggaatgaacctctctcatgcggccgccaagcttagaaccaaacttcacgaggatctcatgctgccactggtcgtatttggcattcaccttggtttggacttgctcgtaatcaatcctgatatttccgaagccgcggctgacttcagaagtatcgaatgtagcccgactctttctaatttcctgaagaagctgaagccattgagacagatcatctcccaggatttcgtaaacctgctcagaccgaagatcccaaagtgattggaactgcagccacttatcgacatactcagaaacatccttcagtctggactcgacaacattgtagacttcattgagctgatcggtgcaattttgcgggaggtcggagaagcagacttcggacaggcgaacattttgcacgacaatggagatctgataacgcgagggcttgatcttttccagattgcaaatcacaccgagccatgcatcaaagtgggagaaccagcttgcgcgtgcaaattgtaacggcgggtccagatggaggacttggtttctcatcagaatctcgtggaagagttccgggaactggatcttgtaattcaaagcatccgcttcggccgtcgcaagttgatgatgagaagtcgagttttcgttgttgataccttggaaggtcataatccactcgcgcacagcgcgaataagtcggtcgcgcagaattgcctcgatgcttccattaagctcagcaacccagtatccaaggttcacgtaattttcgaggttaagcttatcaacagcaacttggatgctgtccaagcgttgcttgaaagctgatgagtcgtatgggcatgtcttgagttcatggatcgatttctgaatgttctcattgatggcgtcaagaacgctagttttcgtctgaagtgtcgatgctgaaacggcaaactcacggacaaattgaacatgcttgctttcagaccgaccaggcaacgatgcctccatgccatttgccaatgctgactgcttgacgtgtagctcgtaagaatggacgaaggattcccaccggagagggatacccttggcaaccataatctgtgcatcgttcatgtagccgttgagcagcatattgacatcggtcatcgacgcgattgctcgattggtctgcaacagggtgcgaacactctccatcaggctaatggcgtaggggtaaacacgcttagcctccttcgagatattgctgacagcatgaggaacttggaagttgagccagataagattgcggacctccttgaagagggcaattatctgagcatcgaagttgactgccagctcccaaacgtttcctgcagatcggttgcgcacaacattaaacaaccgtccagcaattgtaaaatgacgccgttgaacatcccacagccatgactcgaaaacaggccgggtatcgagcttcttacggaacaggttaccctcattctgtaatttctggccctctgcgtgtaggtgccagttctcaccgagaacattctcgacctttcgcatgtagccatcaagctgatgctcgatctggcgagtccaaataatggcgcccgacacggggggcaggtcccgcagttgggccatagcatgagcttccgaattaccgtactgttgtttgaagcgctcatgcaaagcactgatgtctcgcttgacattgtcaataagttgcgtttgatattcgccaattgcaccacgaatcttaggacgaacgagaagggcgttgaacttcgagaacacacggaacatctcattggcattcctggcggtcgccagacggtcacgaaggcgagcaatgatagagttctcaacacgggaagtacgctcactgtaggcaatttcagcctgttcccaggtgagagatccctccggtgagacatccaaaacgtccacgttcttgagagcagcgtaggcgtgcgcaacttcctctacggcatcaacatcaccaatctcctcgactatcacagcgccgtcagcatcaactccagctccattctcggcagatgaagagctgttgggacctagaacgttgataatggttttctggagctgttcatggttgatcctgaatgtgtcgacgtacttcagccgctcgcgggttttgtcgtgtctcgcattgatcttaataggaataaatttttcgttacgacgccgtgttgattcgcgagcaacgtttgtgaattccttcaagttctcatcccaagtgcgccaaatcgcttgtgtggtcttcatcaaagaccggaactcgcgatagtccagatgcaagatcgtacgtccattgatcagctcatggatcttcttatcaagatcgcccgagattgcttcaacgagcgaaagtgcccgcttaatggggtaggggcaaatctttagctttttattcaggtgagtgaaaatcaagtttagtgattcctggaccttctgcaaagaggtcgcagacaggagttcatcgagaggaaagtctcgcatcagctggttgtacttctggaccaattcagtggcctctttcagcccagtgtctgccacgaaactgagggttggttggtatcgtttcgcatggcgaagaatgtccatagtcaaccgaacaccatcgctttggagctgagcttcgattccctccaaggcagcctctaaggacagccagaagttgacctcaggagaagcagattcgctgtcgggatcacgggacatcttagtgattgtctgaatggatctaatccaaccgttcacgacattctgaatgctgtttgtgaaagcgctgctctccaataccgccgatggaatcaactcgaccgatggtttgataccacgtgtttccgcttccttaagagcagcctgcaccatttcatgaagaggcaggttcagagctggaatttctacattctgctggaggtgcatcaaccctagctccaaatctgcgaatctcttctttgttcctgggataccagtcttcgcttccgtatccgttttcgatttcgtgccgatagctgtctcctggctgcgagtgtaggattcgaagtaaggactcagaccatggtgtatcatcaaatgtaggatttggtagggtgacatggaattcccctgctgggcggtggtattgctgagagtagcggggccggggagattcatgacttggacttgcgacgctatcggaagactcatgtcgattggaacaggccgttttatgatcgccacggaggatacggttgtaggagcggacgagatatcggaggagagattgtaggcatatttcaccgctgtatcttcgcggcataattagcagcatatttttgaatgcctatgcacttgggtttgacataccttggtcctccgtttcactgtcggtttcctccactgtcacaatgtccttttgcacatagagtgcaacttgcgattctgaggcaaatcgtgtacaccgttgtagtgtttcattgtactttgattccgaaagcaagctcccagcgctttccagctcgaacctttgggctcccagtgtcacctgaagcacttcggtcaagtactgaatgaccgcgccggaatcaaccagagctgcggtctctggtgctgaggcgccatttggcacacctgatgaggcgacctccatgatgccgagattattatgacaaattcaaagtgttcatcggtggtaaggaataataggagcgcggatcgggtgggtgtttgggatgttgagatcgcgtcaagcgggttgggccgaaaaacacagagcaaaaggataatgacaaaggctggaaagaaagctaaaatctaatcgattaaaaatggttgcaaagataaattccaggcctatgccgtcctgggtcttatgtctgttgcagatcaaaaagatacgcggcgtgtttgctttacttcaggggatgaacactattccccattaggttaagcgtgacacgacccccatgtgacaccgcacatccatggctctcgtccctatcccgttcctttcgaagtataagattcaccttaatattgacgggtacattatcgggttactaggtaatggaatttgaatctcataatttgcaaatggtactaaaatgaaacaaagaacaaatttcgcccaatctgtctgtcctccacaacttctctccttttcaaattgccgttccgatacttgcgcggtccacggtggcttgtccaccttgacaagcacagtgatatttctctcggaactcggaaagagacattccatcaataacagccaatgcccgggtactagccctcactttagcataccgactagaagatgcgactgcgctggcaatggattggccgtgcaccataaccgcagcaaagaccctgggggtctccccttccacggcagggacctctgcagatttcaagcagtaatcggtgcattggtagctgtgagtcatttggctatgaaggaatgtctatgacctattagcataaagcatataatctcaggggcaggagatggtcttaccgttggatgtctgtttgcaaatgtgtcgtaaatagacatgtcgtggaaaaatggtaggatatgcatgttgaagaaggcttcaataactgtgaagtcgaagccagaatcaacaaatatagcacccagataagcctcaagcatgtcgggaagacactgtaattcgtgagcatgtggattgtgtccatgtcaaataaggaacttacctttggggaatctgacgtcgaaagccagtagtcgacctctccgttgccttcgctctctgcaagctgaatttcctctgcgtatttgttgttttggatcatgagaggattgctgaaatgctgaagatgaacatgaagccccagttttacagccaaagcaccaagaaatttgttggataccatagccatctattcatgttagtcggcacttgcttgtggcttgacattgtgaaaaaaaaaatttacggaccttgtgttcagtcaaccactgcggatctcggttggggaaccgatgaaacaagtgctccacgcacaccatatccaggagtgcatcacccaagaactcgagcctctgataacaaggcaccttagcccatgccaatggataagatggatgcgtgaaagccgaccgcaggagacgagggtacttgaactcgtagcctactttctcgaagatttgctgggccaggttcttttcaaatccatccgctgccctgttctgatacaaaggcatggaatatgctgagaggtagtcttcccatgaggttgccgtgtggttatgactgttgacgaagacggtgacagctttgatagccatatcataccgattgtcatcacctcccgagagcaacgatgctcctatcaatgcctcgcagacatctgctatagtcttctcagccaaggagtgcttaccttcactggcaaaaaacttggcgtggtcccgaccatactcgagcgaaagacctggggggtaccacatatgtctgtgattaagtgtcagtaaaacacacaattgttgggacaaaatgtaaagaacataccgagagaacccacggctacgtatgtactcatagagtttcagttcaattgcgtttctgaacaggttcttgttgcagatgagacacattctgttaacgtggtagtcgtattcatcatcctccggattttgaataaagagcgaaatggatgttgccatcttgagcacagagtcccctagtagttcaaggcgctcgtaatttttccccattcctcgttgaacgtgaatctgtaggctccgatgctcttcggtgttgtctgaatccttggtgaaggcctccagggcatactcgagcttaatgccaccaagacctagcatattgcatccctcctgggcgatcaggtaggattccattcgcgtgataattgctggaaagacaaaacacgtcgcggccacagacgtggaaatctgagttacatgttagcatattggataaactgaaacgtatactggtgaagaactaaccgccgatatagccaagggctgagggcaaatgacacatctcgagttggatgctttctcttcctcggccgctttatcaaggaagttccgccgaaggcagatcaactccgcctggaagaccggttgggtccagatacatcggttgaagaatttgggacgtgaatttttgctcaaactcaaggaccaattcatgatattgtctgaccattttcgagatggtgcgtaggatgggggtgggtctgaaggacgtagattggggtctatagcaagcgggaagtatcgatactttccattccaatcgtcgtagatgaatcgagtcagcaacgattctggctccatgtcagaagaccacataagcttggggttatctcggacatattgtaaagcctcccagtcaattatgtcaaagatacttgttgacgttccaatgtcgacatcttctcgagcaggcgcaagccagtatggaaactgttccgagacgtgcttataggtcttgtgaaacacgtcatgaaagacagcaagtgtaaatacagtcagatattcgagatctttggaagcaacctcgaggccgtcgtcaatacacaaagactgaactgtagtctcgatatccttatccaagaagaccgggaaagtcggaattgtagtgattcgctctcgtgtaagcaatacaatacttccatgagctcgagccagaggctttgatggaatgagacgaataactatcgcgtagaggcgtgtgggaacggttccctgcagcctagcccagattgagggcttagtacgcattcggtactgatcagtcctctttgaagtaatagccagtttggcattgcgcattgctggcaagcgcttgtggtagatagagttgaagtgctcatccaacagattcttttggcgaagcagcatacacgcatcaaaagcagcggactgcttggcgagtgatttcttcgattcggaacgtccaatcactcttcgcacaggcgacttctccggcataattatctcacagctgaatgattcgttctctgacatcacaatgtatgtgaccgatgctgatatctcattttcgtattgctagaatttggtcagcgttagctttgatgaaagccatcagaggcaaactgattcttaccaatgagctggcaaatcgtgccaatacaccaatcgcatggcgacaggttaacatggcacctgtgttcgggatggtgtatgttctcttcctatcttcctcgtgaataagccctttcgtatcgtgatcggctccgtacaattttcgatcctccggcagcagattgcagaaattcttcatgaggtgctgtttatgtcagttagttcagtgctctattacctgcgaagcacccttacctctgctcttcgaacttcctgtagtctcatgctgtggttgtgattgccactttcgaccatagttgcgtactgcagagtagtgagtaaatcagttgcgtctcataaaggggaaggaaatctaaccactgaatcagcgcttctggcacggcctcggctttggacatattgaattaccgtgtcaaacagatcgaatctttgctagtcagtaaaagtaacagttgtgattagaatggtgaatgacataccttaccaccagattacaatctgggatgtcaaggccttcctctgcgaccgatgttgcaaactggaaatgattagactttctctataagttgttttttcgggtcgtgtaaaagctcaccaagcagttgacttcactttttcggaacttgaccaagacaagaaactgccgacgaaacgtggaattcattcctagagcatctcctttgcgaacaccaaccaaagcatcgggacggaggtttgggagttgcagcttttcgcacagctgtaacattattttagctgtattgcgccgttgtgtgaacacaatgcatttggtatctggcgacttcgcaaactgttcttgcaactttctcattaaaagctctactttggagctgagatcagccggcgtaaatgcctggttttcaatgtattccttgacgagctggttggcttcttggatccgcttaatgtcctctgaggccttttcagaatcctggggatcagaatcggtgactttgccgatactaccctccagcttgggcagcacttcgtcagccagggccaaggcccatacctggtctgcgcaccaagcccctaattccgagcttgcaaccgatgcaaatcgaaatgcgccctctagtattggcatatcaccatacttgactttcaaagtaccatgtagattggtctcaaacggcggaggaagcttgtcgtagacccattcctcttccattggcttgttcacgaaattccgcaggagggtaagatctgaggttgttgcaatgcgactatctaaaagagtctcaagttggctatatacagtcagcaaaagcttccaatttcggttagttagggtgctcacattgctgcttccgctatgtcacacttagcatcaaccggggaagcggtcatcccgaagatccttgggcgcttttcaggatccgctttcagatagctgtctcggatgatactaataaatgtcagctcttgtcatcatgttacaattgaaaaatgggctgcataccgagcatacggatgctccttcttggcatggtgagcttcgtcgaagatcagaagattgatctggtcaattcttatatggccattcagtagagattggtttagaatctccgccgtgcatacaatcaccatgtacttttcaagatgcttgttccacgtctgttggtcccaaagatcgggtcccagattgccataaaaatgagcgactctttgatcgagattgtttctcaataccgcagactgttgaaaaaccaaagtcacactgtcgaccaggaaaaaggcaacgcgaggacttgcgccatttgcacgtttgttgagttcgatttggagaatatgcttgagcaaaagcacggccactaaagtcttcccagaccctgtgtcgagaaccgcgatcgtgttgctagcccgtgctctttcaaagagctcgatttggtattcgcgaggatctagaactccacctccgggctctgtattcgcgagcaaacgagcagttgaaagttccgcatcagatagttcgatatgtgatgcattgggaccgtctttaggcccgttgacgacatggtcttcaagccttccgaactgtcagcattggtcttcaagctaagatatatcaagaacttacagcgcattaaacatagcattttgagttctgtgtcggtgcgacaccttcaattgtggggtcgcagcttcgtcgccagatagatctgagctagtatcttcagcctccatcttagctgtcttaccctgtgctagactatgttgaagaagaaatgctgaagaagaggaagaggaagaataaataaagctacggaagtgactcaaacctgggcaagagaggaaaccgtattttacttagcaagcgccgacgacataatacgtttttgtaccccgtcctacttagacatgaatttctcataagtgaagtgagaatgatagatcgcaatgtttgtaggtgcattgagaaggctttcaagaatggctccatgtgcttaacaaaagtccatcaatgactgccttaagtcttttttttgatattccaatgatattgcatttttcttatcattagaaaattgacggcatttacacttatacaataaattacatgttcctatgctctgtcgtcctatatatatccattcatgcatccaggcatgacatccgatgagaatataaactaggactgaaggtgcctgtgcacatgctaaaatgagtataataagagaattgagccatcaatgattgaaaagtaacgactatctatagagagactaaaatgaaggagagccctagaggagaataagagtggaatgaacacatatcaacacaaacccgccactcagtatacagaaaaaacatacatcgactcatataagagtagaagcctttggactaagcgtatagtcttgataccaaccttggaacaagtatagaactcaaaaaattgaggatcgaagtatgagcttctttatcaaacgcttatcggataaaagcttggccttatcgccttatcgtatttccaaaactcagatcgagatcgcgggggacatgtgagcccctactaagcacctctcataacctatctccgacctaatataagcccgcaaggccaatatctgaaccaatggaagaaccgcagagtcttcgctctctatttgcatcagcaaaagagcaaaaagatgcattgggatcgcggggtgacaccaacgctgagacctaccgagacgaggtgaatgcgacgatagccaaattccaagaatgccagcgtcaagtgagcatgctgtccttgtttagttctaatgagttgttggaagatatttcgaccggtgatctccagtacgccaccttgattccggcattgcgttgcccattcggctgatttgttgtccaggtacatgacactggaatttcatctagctgagctcttgcagcgagtttctgactcagatcgtgaagccgtcctcaagcgtgcgctcgaagaatatgagaaatacctgatgcgtttggatgagtacctgctactctctggcggggataagaagctctttgagcaatacatggccaatccgacctcttttaccctggcgccagctaacgacgctgccgccagacgggaaattaaagtgacacggtttcgggaagaaaaagaactaaagcagaaactggaggtatgcgggatcctttgctggatattgtttggcgttcttgcttaccccatctaaagtatttcggacgcaacgaagctcgactgcaaagcgacgacgatgacacccgatccctctatctagcggagcttcagctttacacccaccagaccttccaggcattagatctcctgatccaagaattgtcgatactttcaggtatgcgcaatgcgccgcctcgccctccaccgacggacgatcccagacagcgaagcaatattggaggtttgaattactcagagaagctagatccttcagtgtcacagctcttgaagggaggcagaggcggtcctatcctgaacagcaaaggaaagccaatgcagccgttcacgttgttgggtcggcgctcagaaatgcaacaaggagtctttcgttcgggccataaccttcctaccatgacaattgatgaatatctcgaggaagaacacagacgaggaaatgtcatcgaaggaggaggcgagaagtctggcatcaaaccgcaagttgacgaggatgatcacaacattgccgaccaggaaacgatgaaggcacgaaattgggacgagtacacggaagctaatccgaagggtgctggaaacacactgaaccggggataatgtaaaataaccgtcatgaacagagctgctttactatgtccaaacagccacgatagacagggttcttggtgaatatccttgatatattgagcgagtacgggtatactagacaagaaaactcgttcacttcattttcaacagggtatatctgcctagttacagtaaaagttgacctgaacattcagactgcagtggaaacagtctccttggccttgttctgttggatagcctcgagaatgtctccagcgccgtcggcgaccagggccttggctacggtgacgccgaaggcctcagcactttcagcagaggtgacgtcggcttccaattctacctgagcacattctttgccatcgacactgacgaccacagaccgcattcgcaactgcttggcaccctgcgcattttggacccattcggtttcaacgcctagcggggcactgcagcctccctcaagagtccgcaaaagactgcgctcagccaagaccgagaatgtggtatcttgatcaccaatcgtgtccaacatattctgcaaaacagcgtcttccttgcgaatttcgatgccaagggcaccctgtccgacagcatagagcatgccgctgtttttggagtccaaatattgggtgatacgatccgtcaaatcaagacgcagcagaccagcagcggcaagaatgacacatgtgtacgggctatcttcagcatctagctttgataggcgagtgccgatgttaccacggacatcctggactttcaggtgggggtatttctgggccaactgtgctgtgcggcggatggacgaggttccaactacggacccggcggggatctcggaaagacttttgtatggcaacccttgtttcaccacaagtacatccctgctatcttcgcggggcatagtcgggcctagcttgcaggaagaggggagagtagtggggacatctgataagattgcataagtcgtcgtcagctcttttttagggtagaaacagctactctgtgtgagattgggatattatcagacctttcagcgagtggacgataagatcgacctgtccgttgatcatcaattcctccaattcctccgtccacaggttcttggtggtgaaatcccgtagtgcgatagtggtgttcaggtcaccggttgtctccttggagaataccttatattcatattgcgggaatgctttcttcaatgcctcgaggactaaatctgtctggagcagagccagtttagatttgcgggtgccgatggtaaaggtctttttggtgggggcgggggtagtcattttgaggcggaaagaaagcgtatgcagagaatgggcttagagagtatgcgagtagatgtacggggttgtatgagctatgcccgcaagataccagatcgccgaggaaagtcaggcgaagaggcgaagtgggtttggagaactccgatcacgggacacatgcagatcacctgaacagagattacgacgttgggcacatacaataatctgggaaataggaataaatatataagaatagtagactcatagttattacaatgcatgtagatctatcagattagatataaaccgtcaacggcaaatcccttaattcttccccggttgatcatcaacctcggctacagggcgtggagattgcgaggcatgcgacttatctcccccggacttcccatctcatctacgtgcttctggaacctccccggccatctctcctctacatataattcattcacatccccttcatcccttgtcccatcactgattcctcattctccatacaatttacacttacaccttcatacttcatattcccggattcctatctttgccaccctattccatcatcactagggcccgcacaagatgggatccaacggtagaactactaagattccccttgtacctcttcccaagggctcggtcctgctcccgggcgtgactctacgcattccagtctccaaccgtcccgatctcgccaatcttctgtcgtcactagtggacaagccttcgaagcgagatgcgaatactatcaccttcggatgtgttccactcaactcaccttttttgagccgggatggacagcagctcctcgaaggcgacgactcggattcagagcgaaaggagcaatatgactcaattgacgccggtcaggcacggaaagaggacttgttccgatgcggaactgttggcaaagtcatcggagttcagcgccgggcctactcggagccatttttacttgtccaaggttggcaaagattctctattaagaaggtcctacgagaccgcccatactttgaggctgaggtcttcattcatgacgaatcaagttagtttccacagacacaaaggacaaagaccacatggctaatcatacttcctatacttctagactctggccaaggcgatgcggaagtcgctgtgctattccaacaattgagacagctctctcgagagcttcttactctcttacgtctctcctcattgctgtcggcagcctcctctcgtctctcgccactcgttgcccgaaaattcgagctctatatatcaaagacagaattgacacaagcggggaagctggcggatttcatggcggatgtatctgacgcaagctttgaggaaaagctacgtatcctcggctcgctgaatgtcaaggaacgcttggagagggttgttgagatcctcaccagacaggcacagcatattaagagtagtgtcagggtcacctcgattggctcgacctcgttcccctcctccgccatggatatcagtcatattgacccccgtgatcgcgagttgctcgctaagcgtgcaatttcgggcctctcaggcatgacacctcctggtgggcggggcaacgacgaagagaaggaacccaatgaagtagatgagctacagcagaagctgaatgatgcgcagcttagtcccgaagctcagaaagttgcggacaaggaattgaaacgcctgcgaaagatgaaccctgccaatgccgagtacggtgtttgccggacttatctggaaaacttgtcagaaatcccatggaccaaagcgacagaggaccaacttggaccggacacattgaagaacgccaggaagcagctggatgaggaccactacggcctggagcgaatcaagaagcgactgctggagtatttggccgtgttgcgcctgaagcagtccaccaactcggatgttgaacgccagatctcaggactttccagggacttggacgcctcggcagctggagatgtcgatcatgatgtccccctgctgtcagagtctgaccggattgcattggagacccgccttgagatcctcaagtccaagcgtatgaccgacaagtcccctatcttgcttctggtcggaccccctggaactggaaagacaagtttagccaagtctgttgctgcttcgcttggccggaaattccaccggatctcccttggtggtgtcagagacgaggcggaaatccggggccatcggcgcacatatgttgcagctatgcctggtttgattgtgaatggtttgaagaaggtcggtgtttcaaacccggtcattctactggatgagattgacaaggtcggcggcgccaacttccaaggagacccggccgctgccatgctggaggttcttgatcctgaacagaatcataccttcaccgatcactatatcaatatccctatcgacctgagcaaggttcttttccttgctactgccaactccctggacacgatcccggcacctctgcttgaccgcatggagaccatctccctgtcaggatacaccaccgttgagaagcggcacattgccaagcaacacctgattccgaagcagattagatctaatggtctcaacgaggaccaagtaaatctgtcggacgaagtgattgataaaaccatcacctcatatacccgtgagtcaggtgttcgcaacctagagcgggaacttggctctatatgtcgccataaggccgtccaatttgccgacgccggggatgccgatcgcctagccgattataaccctgttgtatctgtcgacgatctggaggatatcctcgggatcgagagatttgaggaggagatcaccgagaagcacggtcgtcccggtgttgtcacaggccttgtcgcctactctactggtggccagggtagcatcctgttcatcgaggtggcagatatgcccggcaacggacgcgtccagctgaccggtaagctgggcgacgtgctcaaggaatctgtcgaagtagccctgacgtgggtgaaggcacactccttcgagctcggtctgactcacgacccccgtgaagatataatgaagagccgtagcctgcacgtccactgcccctccggcgctatccccaaggatggaccttcggctggtcttgcccacactgttgccttggtttccttgtttagcaacaaacctgtcccaccgcagatcgccatgaccggcgaggtttctctccgcggccgggttatgcccgtcggcggtatcaaagagaagctgattggtgctctgcgtgcgggcgtcaagaccgtgctgctgccggaccacaatcggaaagacgtcaaagatgtcccacaggaagtcaaggatggtctggaaatcatctatgtcaagtatgtcatcccttcctaaccttggtttaataactgctaacaattgtttcacagacacatctgggaaggattgcgccatgtctggcccgatgcgcagtggccgggccagcaccagatgaactttgtcgagagccgactgtaaaccgttctcaacactataagttcaaggggctttgcctctcgcggtccccccacctaccctcatttttgcatagcgtataatagccagaggcaccattgacttgtatttaatcagattgtcttccgtgatgcgttcatgccagtcaatatttcgtgtctatatcactcaacataccgggttcagttctaacactaacaccacaactcacaattcacgaaatctattctatcataaaattcatgtaaaccttgactagattagatcagaaaagatgatacgccatattcaagatgtatacaatctaccccaagagtataatacacggatccagccaaacatggaccagaagatagagcaagaaacaccaattttccccaatggaggggatggaaaaaagtcatgaagaacaatgcaaggaatctcatcaaaacagaaaccgattaccgcgctccgtgcttccgctgcttagcataccaagccggcaacgtagcagcagggacgaaccctccattcttagccgcctggtgtggctccaagcccagagccttccaggtcggtctccaagtctccttcttctcgagcagcgccttggcctgctccttataggcttggcgcaactcttcatcgggcttttcacccttgttcggcttgggattctccttttcttgtaggtcgatctggaacttctcggcctttctccagccttcattctcccatctattggtggaaattgattagttaaaatgtcccgtctggttggaggtgcatgtgtagtattgggaatgtagagacggaagacaacggaattgaacttgaacaagacgacaacgataagtatgggtggcacatactcagtcagatccttcggctcctgggggtacacgaagggctccttcaattcaacggtcatgcgcttctgtgacttaggtcggcgccacgggccgaagcccttgttgtcacgcgagattcgtgtaattggctgtgcctggacataactgcggatgctgagggttccgactccgtacaagtgccataggtagctgcggagatcgaacttgttgaagttgagggggacgcggaattgagcatatcggggggtgaggttgggggtgcggactaaagcgacgcggaattcaggcctaatgaggcgaagaattagctgtagtgcttttggtgtttatggcaaatatccaattgagccggtcgagtttgttgagatgctgtttgggtcgacccgaattgaggttcttggaaattttgggcaacgtacatatacacgggcttgccgatgacgctgggccatttgttttttggggttggttggaccccagcctggttttgtaggcggcgcagggctttcgcctgaacactgctgagacgcaccatcgtgttgttgagtggaggaatctgggggttggaggtgcttgcggatcgcgaatcaaaactgcgttggccgatatgatcacatgacttccatgtatacgccaatagtgaacgacgcaacactcgttggacattcaagtcaggagtcagaattgattacaatgcatttttggtatagtatgaagtatgttgttaatatttcctttagaaatgaagagtttggttttctgtaagttctcccttgataagaaattttgaaaacctatattacatgctttattcatcgtaaatagtcattaaaaaggcccaggatcttttcttttactgctccgccgaccccgagactcggagttcttcgagtcgcttggtgctgtcatcgatgtcttcggagttcttggtctcgtgggcatcactggcctcttcggcttcagatccagactcttcctcatcatcctcatcctcatcctcatcctcatcctcatcgtcgtcgtcgtcgctaccattagcctccccatctcctttgactcccacctctaccatataagcctcgagctcacgggccatcttgcgtgagaagcccgaggcttcaacttcgacatccagacgcttcccaggatttttgaggagcttctttctagcctcggcgaaagtggggccctttgagtcgctcacgaagtggaacttgcgcttgaagtaccgcttgatacattccacatcacggtcgaaatacatttcagcgttaacgtggtcgacagacaacatctgcgggaaatcaatgagaaccgggaccagccggatatgctcatcttcctcttcctcagtaagttctttccccttcatttcggggtctaactcttccttgataaggatattgaactcattgaaatcaccatggataagaccatatcgggcaagatccaagatgatattcataagttcggagtatagcccagcggggtcagcgacttttgagatttggcgcagagggaaagcatcaattagactcatgacgatggtgtgtcggttctgggcgatggggtcggggacagagaatccgttctcgtgcagagccttcatgaaagcgaactccttcattgctgccaatcgagacatgtacatccatgaggctgagctgcggtgtcgtaggtagtcacggttcgtcttgactgttctgaacgagatacgaccgagacggtggattttcataatacgttgcgctccggtgctttctgccaccacgatgatgtctgattccttccccacgccgatttggttgccgaccgaatagatgaccttcgacttttgatgcgcgtgcagcgcaaggtaatccaatcctccgtatgcgagtcggtagccgtcatctataagcagaatacatatatcagtgataagatcagatgcaaaagtaaagggaatgcatacatttggcattcttgacctttgcaatcagattgattttcgcgaggtttgagattgcacgattgacaccgctgccgccccggaggcccgaaagttgcgcgatcaatggcgttggaacgacctcatgattccggctgccagcttcacactaggaataatttacatgttagctaatgattcgcgacagaatatccccaaaggaagaacatcgcggggtaaacccaaggggaggccgataagtaccgctgctagaactcggaaatcttcggaggtgaggtagcgaatagccttagcatcgagtttcatgattgtgaggaaatgaaggagcttttcactttcttccgatttccataaattgattcgctggaggccagaacttcaagaccagtcaacgatgcggcggaggaaaaaagttgataagaacctagccctatgccctatttcctatccgggatgagaaccttgatagctctcgcgttcattggagaaaaatatgcgacaattacaaggtcttgactggatatcttcgaatgtagatgaaagtcaaggggctagtcgaaaatacgtagtctactcatagatgcgagcagttgaacatatataaaaaattgtgagataaatccatgctattcttcattcgttctgaatacattagatccaacgataacccgaccactatacgagtcccgctggttgcgagcaatggatgtaaatcggggaatatctagtctagcttgcttattcggggttttcgtagtccgggttctggaagataggttagtactggtatgtctgacttgagataagggcacttactttacgcaagataaccaagccttcgagagtgctgctcagagggatgtactgctcatcctcaagctcagctctctcaccgtgtgccagcaggactggtgtgctctgagtctgccatccagtgatggtctttgggcgacccgcctggccgaccacgtccacagcctgaccgacgcggacattgacggtgagtggctgaaggtcctcatcgagggtaataaggaagcgggggaacatggcggtgatgaggaagtatagcaggtagtgatgttcagcgaggatgaattgcttggcatcgatgagtgatacaagcacagtaagcaagcccgctgctgagacacgggaaaggacctgtcggtcggtgtggaagggattgagcgtcatggtacccttgcccatgtgtagaagaccctgtgcgatgcgaaccatgaatagtgagttctggtcgcggtggtagtagctggccaattgccggagaagctgtgcgatacgggcattgttggtaccagcgccacagagacccatggcgaagatggcattaatggcaacatcgttgtcattgtcgtgactataccgggacagtgtgtcgtaaaccttcatttgtgggttgctggggctgatcaagcccatagccaggggaacagcccggcgaatattgctagatccgtagtgcatgaggtgaccgaattggcggagaatcatatcctgtccgacatcctcacccatcgcaatgagagacaggccgagaacagcatacgactggactagctcatcacccttgttctcctccttttcttcaatgatgtcattgcagatgtggagaagctcttgtagcttgagcaccgttccagtgcctgcccaagcgcatactgaggcaaggactgaagtgggcttagccatggggtgatcaactgccttgagaatgtcaaggatgacatcaacctcctcttgacggccaaagtacagaagtgccagaccaagggccatgaaccttgtccacttgtccttgagctgcttctgacgttcctcatccatcaaagtcgtcgcaattgcctcgctaacctggtggttggatgaaccaacaaagatgagacccagtgaaactgctgccatggcagacagttgcatgtctagtgaggcgtcctccacaatgggaaggaggacctcaagcagttcttccttgttggatccggcatatgctaaaccaagacccatgatggatgcaactctcatcggcacgctcttcgcctcaaggttgtcgggatcactcaagagggcaagggcggggtcggaatcaagtcgaacgccggagttcaggataccaatagcgagcagtgcaccagccttaacctggtcttcttgcgcgtaggtgaacttgtcgatcttatccaacccatcctcgacatcacggtgtagcagcatacccagtgacgcagttgtggaaagcatgccatcatccttggtcttccacacccacgggcccttatcaccctccactagcatcatcttatcattaccaaagccggcgttaacaaacgagttgacaaaggcgctggccaagttgtgtcgtgccgagtcaagattggtgagcccggctccgcgactgctctcgagatgtgtcttgtagatatcctccggcattttggggtccagaatattgagttccttggccagggatttgaagtgcttcggaatagaagtgttattgagacaatcagccaaggcctctccctcctcatcttcggctgggaggtcgagccagatctgctgccgagcgacaaggaatgccatctgtttcttcaacgatttgtcagtcgtggcatggatgtcgctcttgataagatcaatgtcattcaaacggatagcgagcacgattgcttgcgaaagtttgttgtagcggacgtagatcccgtgggcggttcgaaggaattgctgatcttcagggtaagtgagtagattgaccatgctgaccatatacaagcagactcgagcgtatgtgttctcgtcaacgaattgagggatatcttcgatgatttccagttcgctcatgagatcaactgcatcagcttcagcgttatgactcaggaaatagggcaccagcgacaacgcaaggtccactagatcctgggtatcctggtctgcgttcaaccggttctgatactcctgtccgagttccagcgcgagatgtcggacatactcgtggccccaggagccaagatcctccgacttggccaacaggcggtatttgatggtatccagcttctcttcgtctccgcaggtcattccaagcaccgacagcatgtcagctagcgagttctagaaaaaaggatactgttagtttgtcacaaagcgatggaagcgctgcagaaccaacctgcacagggccgggggcccatttctcgtagagcgctgtcaggtcatcataatgcggtcggaggaacttgagaggcttaggaacagctgtcatggaggatgtagaagttttgataaagttcttgattgcgtccaaagcaggcccatagagcgaggtatcgggttcctatgagcaaaaaaaatgattaacgtcattgtgctatgcgcacgggacaggatagtaactgtacctttaaccgctcaacgagcatctcaagctcgcttttcaattgttgatcttcttcactgagttcctctgtgtgtagttttcgtcagcatgttgctttgagtgccaccgtggacccttgagagagaccacatgctccgttgcgagaacttggaaatgccttatcgcaacgtaccatctttagatgcctcatctttcttcttttcgtctgctggcttttcgccattttcggtgttcttgccgctcaactcgcgaacatcatcaaccttgcccttgcccttgtcggcggaggttggccgttcgccctcgttggccatttctgatggtagctggggaccaagtcggggggaaactgaaccggcgtgggagaagtaggtatcaagcaggtgagcagaagatggtgttacaaagcagagatagatgaaattctgcaagtaaagagtgatgcaagtggattgtaagctggtgatggagaagcagagctcggtctggtgcagctccgtaattagattacataatgtgccaagccctgcggaaggccctcgtcattgttttggatttacgatggctacgacttcaattctatgactcgaatccttatgactctgatttatgagggagaggatgacttaggggtattttaatatcggcttcaatttttacacccctttgtcgtacatcggaaagtgctatgtgcggtttatgcattttaccatgcttgtacacatctaaaagacatcccagaacacatgtaacgccgctaatatcattttagaccaactagataagattattaaattccacatcctcgaggatataggcctcatgagcggccgactcttcttgttatcctgagtttggtaaacgtgccggtgaaattctgattcagatcctagagatttcgctgggaattcattcttatatgcaaaataataggtctgtcgagacgtcatcaatcttgctatctctggggcatcctccgtaaagagttcggaactgcttggcatattcttccgtctgtttggtgtatgccgcagccgttgagccctctccgttgtatgaaagcagaggcaaagcatcaagatcgggaagacccgaagaaaacaagtcgagaagtggcattatagttgatgcacggttcagtggtttttcaatggagcctaagccggcgagagagccccctgtaagcggctgagcaggatcgtgaatgtcttgagtagcttcttcatccgaggttgcgggactgttgtccgcaaattcttctgggggctgatatagctcgttgtgtactgtagcaatcgaagaagattttattcctgggaatgatggatataacaggtagtatcctttggcgcggatcatctcgagcatgtattccataaaggccggatatttctccgatataatctttggttgggaggccgctgtggattgcggagtcgacaggcggttagccatgaacgaatggaattccgcccatgcatcaccaaaatacaaagctgcattactattgggggcctgccagaggaacgagggaagaaactgttctttgccttcaacggtcatgggtggcggggtgaaagattgactatcgaccgtgggtttgaatgatggcagttcaagtgagatgccgatcatattggaaaaaaggcgcttggcgcgagaagactgtttgtaattcagtacagcaaacttcaggtagtggtagaacgatggtgcgagctcggtctgtggagatagcagaagcaaatgtgtcatctcaggatcccgcggatagaacgactccacggttcgaagcgatgattcttctgtgtccatgccatggggttgaatgcgccgccgaatagtgattcggccaggaagctgggtcagcccgtccaaatgttggagaaaccgaagcaactgtaaatctacccgctggggtagttctattgtcaagcttggagccgatcctaaatagtcggctgcatccaatgacttaataagcctgatcaaagacccagaagactcggaggctgcatgcaccaccatttcgatttgtatattattccacgctattgcaggtacggtcagcatttccggacatgacataccaaagaggaggaagataacctacatcgaagagcttggctatccagtgaagctatccacataagattccttgaatcagaggaaagagcaacgtgagggacgtcacgttctcgagaaaagacctcaaccccgtcccagaaaaaggaatcctcccagtcccgaccttgtgtaatgatgagctcggggctgatgtaggcttttatgttttgcaacccccctatcacagaccgcttcatacggtcatcggtagatttgggtgcatagtccggccgagcatctgtcagttgtcgccaagtcagcaacacgcgttcgaccatcaggatctgaatatcataccgtgccatgtcatcgggcattcactatctctgattctgttgacttccttgattccgtcaatcgagacttcctccttgcccatcaaggtgaaatgcacatagttcagccgctgactagccatccgacaagctaagggcagaagatctgacacactgcggagacttgaggctgcaaacaaaactgcacggctcgtggttttctgcgaatatttatagcgaggaagagagtgggccaactcatagaatttgatcatcccatcgtaagcttcctcctttcggtccgattccgacaccttgactggcggcaaattgtccagtagtgcattgcctggcttgggaacagcagctggattgcctgagccagcccatctggcaaggctttcttctcgtagcttcgcagccgcagagtcgtaccgatctgtgacaggtcctaggtctgtcggcatgtgcttgaagaactcgtagacgaggataagtgcaatgatagcaaacaatattcggcgaggtcggggcattgctcggtgccgcagaggtaggaagcgtgcttgatcggatggtcgatggtcgtcatctttcttgcccatctcttcatcagcctgaagaggcatttttgcgcggttcatgatttcggcccggaattattaagggaaagctccgtgagctccgtgggtttctttatgacatcgaagcaacggatagatgcagaggacaattgcgaccggagtgttgcatatccattgcgaaaggaagaatgtagcggagcaatggtatccaccagcaatgacgcctgggctctcttatcgccttatcgggtcttcgccttttctccaactacgcgcatttcgcaacctaacccccacagagcaccttcctgatagctggaaatcaggatggaagacgatatgaatattgagcctatcgatcaacgcggcaccaagcgcgccgtagaggaagatgagcctctggaaccccctaaaccaaagaaaatcaaggtacagtaacgcgtgcacatgaaaccaatcatacactatcacataccagaaatactaaattccgtacaggctttggatcccgatgtcgtaaataaaattgctgctggggagattatcgttgctccaatgcacgcactgaaggagctcatcgaaaacgccgtcgatgctggctccacctcgattgaagtcctaattaaggaagggggtctgaaactactccagattactgataatggccatggcattgatgtaagccatttttaagattatagcagccggctctaacattatctagcgagacgatctccctattctctgcgagagattcactacatctaagctcaaagaattcgaagatttgacctccattggaacatacggattccgcggtgaagctctagctagtatcagtcatatcgcacatctgacggttacaacgaagactgctggatccagctgcgcctggcgagcacattacggagatggcaaattgataccggcaaagccaggccagaattccgcacccaaggcaacggctggccgagggggaactcaaattaccgtaagttaaaccgatgaaaatatggcaactttcaagttaacggagcccaaggtcgaggatctcttctataacgttcccactcgacggagagcattccgctcggcaagcgaggaatatgctaaaatccttgatgtcgttggccggtacgcagtgcattgctccggagttgctttctcatgccgcaagcacggagactccggtgtgagcatatcaactccagtcagcgcaaatactgtcgaccggatccgccagatccacggcagtgccgtggcaaacgaacttgttgaattcaaaacagaggataccaagttcggatttcacgcatccggcttcgctaccaacgccaactatcatgtcaagaagacagtaattctgcttttcataaatcaccgcgcagtagagtcaaccgctgttaagcgtgcagttgaacagacttactctgcctttttgcccaaaggcggccatcctttcgtctatcttgatctcgaggtcgagcctagccgcgtcgacgtgaatgtacacccgacaaagcgggaagtaaatttcctaaatgaagacgagatcattgaacttgtttgcgctgaaatccgatccaagctggttgaggtagattcgagtcgcacgttcctgacacaaagtctcctacctggcgtgcagacaatcgagtcactacaacgcgatcgagacgctcaaactcacgagggaacagcagaggcaacaaaagccggagcgacgcccaaaacgcccgcaacggctaagagaccctacgaaaacaacctcataagaacagactcaaaagtccgcaaaatcacggcaatgctaggcccagccgcctcacctcgcgacccatccaacccagacgcacccacagaacccaacgacccaacgacatcaattctagacaacggcctccaatacgaaacaaccgatcgccaacccctaaagatcgccctctcatccgtcaagggtctccgagccgccgtccgctccgagatgcacaacacactaaccgagatgttcgcgtcacacacatacgtcggactagtggacgaacgacgccgactcgcagcaatccaatcaggcgtgaagctatacctaatcgactacggactcgcatgccacgaattcttctaccaagtaggcctaaccgacttcggcaacttcggcgtaatccgcctagacccagcgccgaagttggtagatctactgaaaatcgccgcagaatcagaacgccaagagcacccggacagcagcaaagcggacgaggccgattccatcttcgccaatgcaccggagatgatagcgcgcacgctcatcgaccgtcgcgaaatgctgaacgagtacttctcgctgcagatcagtcccgacggagacttgctttccatcccgctgttgctgaaggggtatctgcctgcgctggcgaaactgcctcgtttcctgctgaggcttgggccgtatgtggactgggacagtgaggagggttgtttccgtacatttttgcgtgagctggctgctttttacacgcctgagcagcttccggttctgtcgcggcctgttgcgcaggacgcgctgggggagtcggttacgcaggggccggtggtagccgatgactctggggtcgaggatgaagatgcttttgttagggcgcgtcgtgcacagatggttcgcatgttggagtatgctattttcccggctctccgtgcgcggctggttgccacgtcacggctgctgcggggtgtggttgaggttgcagatctaaaggggctatatcgggtgtttgagcgctgttgagtaataagaggatgtcgtaatgtcatacagttgtattataccgaattatatttatgaataatgaatgaatatctgtctgcttttcggcgggggatctaaaggcctgcattggtgatcgttcatatacctcatacctattgtgcgttcgacttgatattcccgtaaatcctacaaggtatcttgaaccgaatcgagagatgtgaagcctgaatgagacgaataacattaaaatggtcagcagatacgcctgtgatcaccgaaattgtgaccacaccaaccctaaataacacataacccaaagcccatagaagggaccgagagaggagaaaaaaggcgagacaaaatgataaagacaagacgacgaagagataataattcaaatggatatgaaaatgtaataagtatgttttcgaaagttccagttcaaacgtgcagcgtagcatgaagacgtaacccctagacaaggtgaggtgtatcatgagaaaatgctggtagaatgatatgaaataccagtgcaaaacctggattgctggatgaaacagcaacaaaagaaagaaaaaaagtagaaagtagaaattggaggcagaaagataaaataggccgaaatcaagaggtaaaatcaacaagatgggccggctgagaagaaagaaaatatcgggtcgaacagagacagcagaaagattgcatggatggttgttgcaatatcatgccctaaggtcttcagaacgccgagcgccaaagatcaatcaaaaggtcgtctcatgttcgtagaaatcgtgcagagtcattgtatcgtagtgtgtagtatcccgaataggtgaggtgacaacacgcattaagggagtaggtttagtgtccgggtcatcgtaaagccgagtgttgaccctaagtagtcggtagagaagtcttgtgaaatgtttaagcgttcgcgtttgcagtaggaatggcaatctcgtatccagtatccagtaagccgccctcataatcctgattgtgtagactgggggtgggtcgaggctactcttagtgcctcgaataaggcttgttgagcagagctatctcacgtgcaacaatgtcccattcaagatctcgcttgacgggctggcctcgctttttcatttgatgctcttcccattgaaggagttcataactgcagggaaatgtgagcaatctttccttgttgaatgtgagggtagaaggacagatgcttacacaaagcgaagatgtggctggatgatgacgttgagtcgtcttgcgcggacaaagcagctgttatgaattagtatcggctcggccaaacgacttaattatagattacttactatgcacgggggaaagagagatgtttggacgccatgacttcagcgatgcaaatacttgcagatcgggaaacaccgacccgacaatgaaccaatgtggccgtgccgtggcgttttcctttttctgtacacagattagcaggttgaaacagaaacggaggagtcacaaattcggaggacttacctatgaagtccaaacaacgatcgtactcctgacagagaggatcaatgccattatcttggacattgtcaatgtacatcagattgtcagctccccatttggcgcggtccgaatctgtccagttgacagcctcgccaatactaagcacacgcttgattccaagctgccacagaagctccgggttgtttgcgtgattcagattgcccagatacagatacggtaggacacggctggggaaggagccgtcgatgctgtgaaaccaatgcggatccccgatttccgagagatctgtcgactgagtcgcagggctttcctgcaagagacgttcttgaatgtggcgtaggaaagcaacgtctgtcggataggcaaagaaattgcgttgcctatcgcaatgcagtcgaagccaggcttcatgggcaggcaccccttctgcaaacataaagtacgccactgccaacagcgagctttcggtataaccgtccgcacagtggatgagaatcttgcggggtttcccgctcgatttgatcataacgacgtctccgtccggttcgaggtcttccgatgatgtttctgggtgcgcgagataatagatccatctgattgtgttgacaatgtcctcaacctctcgggtgtttcccgatgggagcacaagagatcctgatgaagggaactccaagcgctgtgaaccactctctatctgtttatcgagcatagcgaggaagcgcggaccagggatgttggccatgtcgcatgtttcgatcaataggtcgtagccctcctcctttgatgactcgagagctccagtatggaagtagtccggggtagaccctagccaaacattggacgaaatctcggaagcccgggacattgtagacatttccagtcgctcccattgggctaccaatttgttcaggttaactctgggcgtgccaaggttcgttcaaacttaccgaaatccatagtttgacctgtcggttgacctttcgcatcgatggaaatgatctctggatgttggtcggcaacgttggagaatttgtctaggagggtatatcaattgatggttcatgaatgcgggagataaggcaaagcaacgaaccggccagaatgaaggtgttgtacgtcggccgttcctctaggggatccattttcgttcgccataaccgctgcgccttggcaaactggtttgctagttcaacaagtccgctatggctatcatcatcttcagcataaataatgatatccgacatcgcagccagcttggcagtttgtatttggaaattgcggacggagaatccctcgggaggatcagccatcaagaaatgggatgaaggtgccagcacctcatgggcgcttattgcgcccctgatgcgtgctttgctcaggtcacctccaagcttcacgatggtaaggcctcgccagcatttcggagtgtgacgagcatgtcgcttgcgacttgaaaagaatcccagctgcagatggttgtctcggtgcagtccatggagccaaggaaacatcagagaggcgtcgggtaaaggttgtgatgcttgatgagcgatcgcggctgctaatttggctccgtcgatggcatacacagcgggggatgacggtcgtccaatgcgcattctttcatctggaggagacaacagcgaggaaggctgaccgctgggccgggacacggagacaggctgaggctgagatgttggaatcgggcctgtagggcatactggaatatgtctgttcgggatagggcttgatcgtcggtttatcaaggctgaggggattggagagggagggggggtcgagtggtgcagcgcctgctgctggactagcactgtggccatgacgactgactagaacgcgtggttgaaaaggggtgtaatattgtgatgaatatggttgtgtcacttgcaattgcaacacctttgagagtcgaatcaaaagacggttacatcctttgtagtcgcgatatggggaagagtacgaaagcaatggaaatctgactcgcgggtgatcgcaaccacaactacgcggcagttgttagcagaatttcctgaagcgcgtcgcgagtatgagccagtgtcgcgaactcgagcagttgcaaaacatggaaagtaaagaagaaggatgcgagttgggagggggagatcgtacaagaccagcagagataaggcaagggggtgaagaatggaaagataaaggcagtcaggcggcagggagagacttgagataaaagaagcaatgcatcaagtagaaggaggagaggagaggaatggagtggagagcaattgaaggagggggggaagataacgtgggacaagatctgacagcgagtgtacctggggccattgtacattatgtatccccagtgaattctattgtttatacatctgtaacttacatgtatgttactggatatcgtctcatcatcatcacttatcaccatcgtcatggttcccagatggtggccccaattaattgcatctgtatccacacgctccaccgccgcgggtctggatgttatccgcgtaaccttgtattaattgatggtatgatatatgcatcagatacagatcctgaacggcatgtcccctctagacagggatcctgaccacttttctctcgcgtatacttgccccccccctaaaccccacccttcaaaaacctactgggctcaaaaaaaaaagcgaccacagacaactaaccgttgatgtggccaatcactcatgaggcagaccaatgatgacgatgagatttgccgatatctccctcggaccagattatagccttgtctgtgcgtctggggagggggtttccaaggttcttctcctattctccttggttgatggggaacaaagaacttccaaggttatcaccccgctcgagaggatatcaggatccacatcggatgaaaaagccctgccaggtcgagccatttctcctgcatttcgtgtccatggaaacaggaaagtcaatttgccaatccaaaaggattccacgggcactccgtaattgatgtatatggtaaacgttctccatacacccggcagcatccacccgggcatatagtactgaatctcaattttcagatgttcccgagggtggaaacattcttgaaacatgatacatcaaatgaaaaaaagacccaacccacatattactgcttcgagacatctaaaagtacttatatccagtatcccataactagttacagggtggaacgaactaaccccggatcgccactgcgatccactcgaggtgggggacatcacaacgttagatgtaatatgcccaatagtaaacagatgcctaatcccgtcaatagcccgtcccgaaacaacacccttgatcttgtgatgggtatgcctcattgcaggtgcccaagattgggaccgggtacctaacaccgtcgcgccagtgcctaataacaagcctatgtaccatctatatgtcggcaggtatacccaggtcgcgaatgtgtcaatagcagttaagtcgtcttatcttttccctagcgtatcgctggatatttccgccataccggagaacccatgtcaactctcattggtcacctatatcttacaactcctgagccaacggccatagagaaaaagtgggctgtgtcggacggagcgctgcattgaacgatcgggcaactttctgcagatcctgcctcgattcctaccacgtctgcagatcccagctgtcctggacatcatgactaggtgcatactcccttcagtcgggttggtgagctatgtccagaaagtttacgtgtcactaggaatggaataccacctatgttaccagcgggttggtatcaatattatcagtgctgtgcctcggttaaacgcccaagtcggcaccggcaccggtatttggggatatggatactctatgcgccagtcggaacgtgcaggaactgcacatcatcgggcggaaacaaaataggctgttccttgtcttggatctgacacatgttagctgccacagacctagtgcttaccttagttgatatatctaactaatgcacatggccgtttgctacccaagtagccggttaattccatattccagtgaagccacatgataactgagtctcggtctggatagggaattatgcatattggctatggcctgcgccacattacttaggggttcactaacccgagaaagggtagacaggttgaccaactgtcttgactgctgcctatctgacttggacatagtcttgaactattaagcggaagtcgaaagcccaatttcagtcgggcggcatgaagaacgacctaatgagggttatttcggtggcccatgcacaagggactatgtcgtgcgaggcgggtagctgccgtaccttgtttccctcgcgcttgcgaggtattccttcctagtttggtacaccggtctcgattgaaattttcaagaactgaccagtcttcattagtgatacgcgacagacttagtccatgtccagggaacctggtcagtccttgccctttcccagatactgggctgcaggtgttggtgttggtgttggattattggactttaatggcaccttctgcatgggcgacatgtgactagctgagtacatcatccagcccaacagcacaaatgcctcatataatatgcgttgactgagattaacatgatcaggcttctatatttttcattggacagacggtcaccatacatcgaggctgatagacatgaattgctctcaaggtatatatatgattggaaccctattgtctgctcagggtgctcatttgttcgaaaagctcacaccagaatcgccatctacttataacaggtcattacttagagacacacaagctgagggatcctaatacaataacgaggcctttccatcgtcgggttcaatcactatatatatctgcttccacaaccacgtctaacatgtgtcgagtatatgcaacacgataggattaccctatttgctattgcatgcagagtctatgatagacgaacattgcttgtattgacaaaatagtaaaatcggtagggcttaaggatcagggtaaacgatctctacgtcacttatcgtgggggtgagtacctcgggatactctcggccgttttatggaggaaagcaaggagtcagcgaccgaaggtcatagcttcaggggaattatatatccttcttatcatcctgctggattggttcttgcgtgaaaattagccaaaatcagccagagagtgaagtagaagaaacctcggaaagagcgggcgatgactgataagacaactcggtaggcggtgggcaatcaaggtgcggcccaagcgcaaacctctcgcttgtgacgaccaaagacttcgcggatatcatatcctctcttctccacatcctcgtctttaaagtatctcgctttgttccaagtccaagacatgttacgctgtggccagtgacgggcaagagttgctggtgatcccctctcgatatcgccctaagcggggtatctccgacatctgagagttgccttatatcagtcttgatttcatctacaatcccgaacctttctaaaaaatggccatgaatttcgtgacatttaaccaggactatagctatctggctgtgggtgagtctccctccggaattgtttctatatttttgtcgttgaatgtccattgaccgcatttatagcaacatctaagggatttcagatcttcacaactgaaccctttgccaagagctatgaagccaaagaggggaacatcgctgtcattgagatgctattctcaacctcacttgtagcccttatcttatcgccaagacgcttgcagatccaaaacaccaaggtatcttgaatcgttactcattcatgtcattacaggcagtttatataaacatggaactaggaactaatctttgaaatagcgacaatgcacaatatgcgaattaacatttccaacaactgtccttgcagtgaagctgaaccgcaagcgacttgttattgtccttgaggatcagatctatctttatgatatccagaccatgaagcttttgtccaccattgatacctcaccaaaccccaacggtacagagctcttgcgcctgtttttcccctttcattttaagtagttttttgcccagttctgacaagtcaacagcaatatgtgctcttgccccctcttcagagaattgttacatggcatatcctcttccacaaaaagcccccgcagccgcaaatacaccggcgcatgctccccctggaacgacacatgtatctcctacgaccggggatgttctaatctttgatgctgtaaagctagaagctatcaatgtcatcgaagcgcatcgctctcctctggcactcattgcgctgaatagcgatgggacattgcttgctactgcatcagataaaggaaccatcattcgtattttctcagttccagatggccacaagctgtaccagttccgacgtggttccatgccgtcacgaatttacagcatgtctttcaacaccgcatccacgctcctgtgcgtctcttcatccaccgacaccgtccacatcttcaagttggcccagcaaggaccatcgtcagatggctcttcgttgcattctcctccaggtcgggaccatggctctccaccaaatacctatgggtattcacccgaggaagacgagacgggcggggatgctggctcagattcttcctcgcggaggcacaacggcactttgatggggatgcttcgccggacctctcaaaacgtcggcggcgcagttgctgccagaatgggcggatatcttccaaagggagtcagtgagatgtgggagccagcgcgtgactttgcttggatcaaattgccgcgatcgaacccaggccctggtggaaacacaggccccgggccgctgaggagtgtggttgccatgagtagcaatactccccaagtcatggttgtcactagcgatggcaacttctacgttttcaatatcgatctttcgaagggtggagaagggaccttgacgaaacaatactcgtacgtttgaactattctcaatctcggtggatcaagtttaacgttaacactcatatcacagggttgttgattcgaccgataggctgggctacactgcggagtactgagagccaagcccctggaagacaaattaactataaggggatagatctgcccttaacggctccttgctcttcccaacgcctcttttccatgtttctctgttttcggcattggcatttactgccgccttttactatgaatcatcatcctctttttgagcctttagcgtctcaacactcccctcccgacgtttttagtcaggacttcccatctcatacatggtgtattggcgggtctacttcattttgtggctggctatatcgttatatcctctgcttccgaattcaagtcttgaatagctactttagcttctcatacttttcctattggaagaattatatgcagaaatatcttcaaacatcacaagttaagagaggggacttgttggatgaactgggaggctcaacttgatgaaggatgatatgtataagcgcgtatgtacatagaaaacaagcatcgaaagaaacgtgctcaagagtctaaaagttccggcggaatttctgaggaatgttaccaacgacaacttgaatctgctccagcttatcgagggcaatagccgcatcctcctcctcgtcatgcttgcggaaatgttcaatatcctccgggtgggtcaagtcctcctccgtggtatcgtcgccgtggaacttctcaaagtgatgaatttcgtactcatactcaaggtccccatgatgtccagggccgtaaccgagatcgggaagccggttacccgcagctagccccgccagccagtcctcccgattaataaacccagtgcgcccagtgtcgaagatctcaaacactgctcgcacggcatcttgtttcttttcttcactgacaccggcattggattcgtcgttgaggccgtatgtcttgcggacttcgtcttgtgaccatgtccccgaggaatcgtagtcgtggaggatgaagaatgagctcgggtcgaaggattcaatgtggtgttcctctagatatgacaatattagcaaggtcaacttctccattgacgcatcgccaacatgtcttacctatcatgtgtcttgtggcccaatcatctgagggggcttcgtcatttgaatgcgagccgtgggcattggcaagtccgctcaacgcaagcagcccagctgcgagaccgaatagtttattgaccattgaatattgtaacaaaagagattcgttcaagaaaacaaaaaagtagacagatttacagtgcttggatagacattcaacggtgtcaggagatatggggtcttagctcgtttgcaatgtttgcactgatgacccgacccgagcatttgcggaatggaactttcaattaatttgctgcatcgcatgttaccccatctatttccctactcctacttccgacggggctccgggaggagtccaattgatctttagtttgcaatattaccttttggaacacattgtgcgatagcaatgccctgagaatgcagggtttgtggtcccgtactgtttcgaagcagtcgtcctgccgctgtgtcggatgtttgagcactactaccaacggggttacctcgcgggcagcaacctctagtaagagacgacttcgaattggaaactctgttaccgcattttacggcagcattttcgccggtgccgccattgccgatgcgagcgtgaaggatcgccgccgacatgactgggaggaaaagattgccgcggtcaaggccgaggtgagcgagttggtggacgaagaggagcgcattctggcgtcattacaatcacgaagagaaacacgaggactcaatcgcctaatacaagcgaggggattcggcactgtcgcttgtttccctcccggaacccaattcccaaccagcttcaacagaatacgggccttccacacagaaagaacacgtttgaacgcggccggggctcgactggtggaaaacaagccagtcgaggaggacgaacacactattgatgagcaggatgagagcgagattttccttccgcaggagacattacctagttgggtcttggaagatgatcttcgtctgaaggctattcagaaacttgctttaaggcaatttgctatccggattttgctacgaccggccatcgcacatcgttactcgggcgtctcaatgaactacgcggcggactttgagactcctcaggtaaacgtcgcgcagctcctggaggagctgaatcgtcttcgccatcggatgaacacattgaaaacaaacagacacgccacatatagcgatatcacgcaggactatgccgcgagtcaattgggcgagatgcaaagagagcgcgaggcccttgatgccgaactcaccaacgacattcgcatctacacgagccaggagatgcctctccaggaactgcttctgcggatatccaacaacatcttgagctcgagggacccggatcgaccaaccgctttccgggtcatgatcatggcatttggccagacccgccaaaatgacctggttgagctgcttctgcggacattattgccgaaccggttcttcctcaacccgtcgctcgtgatcactatcatcacattcttcagaaaatcgaaaaaccttaaggatttcgatttgttcttgaaaatgctcggcggagaaggctactccgtcaacttagggagcaggggggtttataagcaccgtacggtcaatggtatggatctcattgttccatctttaaatagcagcaatcccgtcatctatgccgccttgatagcggcggcattacgtttcgaccagcccgatcgagccgacgcttggcttcatgctgcacgtggtggaggtttctttgatagttgggaaaccctgttcacctatctacggttttacagccttcgaagggactgggataagggcgtgaacgtcttgagacgagccgtgacctacctcttgtcatcaacggaccaccgtgtagattccgtcgagagattgcttgggcgaatggtcggcctctgcgactcctgtgacaaactagatgcatcggatgcattggtaaaagctgccgtgcacagtggctttgatccaagacttatatcacgacagtcggactcaggacctttcgtccatggtgatcacaagcggtggtcgaatgctgcgaagcaaacaccgagggagaacattgatcgtcccttgtggcagaagtgctacgactttggaaacacctttggggaatacctgagccaaattgaggtgccggtagaggataccttcgcgcgacgcaatgccaaactggccgatcagcatgcagagaatgctttatttactgccctgggacgtagcagaacgccagcttccagtgagggaaagacacctgctggcaacacggcaaatgaggacatctccacactcaaaggcgaggttgcccaactccgcgaactcatctatgagcttcgcaagcaccacatctcagacccttccacgaaagactcctcccgcactccgaccagcgaagaaaccctccctccacccgccgaaaccatcacaacccttaaaaacccccaaccccaaactcccccactaagtcgcaatttcaccagaacttcgactaggatcagcctcgccaaatcgcaagtggcatcttcatctccgcggaaatcaagcaagcgaagcaggcggcgacaaaccagcaccgaccaaccatcattggaacgcacagctcctggtgccgagcctgcagtatttgccagctgagttgtggatcttctaaatcatggacattgactgtccgtgtactcactaaagacggaggagaatttcttgtatattaaatgactacatttgtttccaatagagcacacaggaacaccctgggcaagcagccctgaatgtattaaccacccgagggcgttggtggtgcatacaattgatttaaaattgatttaaaattgattccttgaagaacaactcatggtgaccaggcctgagcctctcgagtatattgtattttgatccagtctcccaaattagacagatttcgaagactggttgaaggcaacggccgaaaaaggattgtccgggagtaaatatggtatggagaagagggagaaagcagaaattctattcgatatattgacatcgtgatgagaaggaagcagtgcgacaaacaagcgtatcatgcgtgaattttaggctgaacagaaacaagtggtctatcgacgcttctcggcgcgcatcttctccttgcgagcgaggcgatcagcagcccgagtaagggcggagcggatgtcacccttggggaagctgttgatatcgtagtatgtaggggcgatatcctggacaacagttagtaaatctactggttataagacaggaatggggaacataccaaaagccattctggcttgacggcagtgacagtacggatgtagttcttggttgtgagaacgaattcgttatacaaaacccattcggcctcgtgggccaggacggtggacgggtgcaggagcacattctggttgtccttgatggtaaggtattggctcttgccgcctgtgtccttcttcgcgacttgcataaagaaaccggcgcaaagggcgcggcggatgttctcgtagtacttcttgtcatcgaaggcagtggagatcatctcgagatcctggcgttccatgatgcggagcagctgggagcggacattatcagcggattggagagcccgctgggagaggaagtggtcgtggcaccactgcttggggtttgcctgggcgtcactgcttcggtatgcgtggtagacgttcagcattgtcagatggtctccgtcggggtgggcaaacaggttcttcatctcatcggcacgcttgcgctgggcaggaggacgaacgaagacctgcggtacagacagaagggcggtgatggaaaggatttcattagagcagtagaattcgggagagctgatcaacataacagcaagggcagggtcgagagggaagtcggaggccagacgacctagctgagtaaggtttccatcatcatccagacaggccaaatagttcagttcttccaatgctctcatcagagtctctggcgcaggcgggtccatcaaatcgaagtggacgagatcatcaacaccaagcttcttcagttcgagcacggttgatgacaagtttgaccgcaggatctcggggtaagttgactcaatcaattccttcttgaatgcgccctcggtgtaaagacggaagcactttccgggacgtgtacgaccggcacgaccagctcgctgctgcgcggaggccttggagataggggaaacgaggagtgactcgacacgaatgcgggggttgtaaatcttttgcttggagaatccaggatccacgacgtacacaataccatcgatggtaagagatgtttcggcgatgttggtcgacacgatgaccttgcgcccggggcggccgcctggtcggcgaggaggtggtgcagggtcgaagatgcgctgttgcatgtgaggaggaagactaccgtacaaagggtagaccttgataggaccagcgtctgcctcgcgaaccatctcatctccctcaagcgcgatttttcgtgaagcatcttcaatctcttcctcaccagtcaagaaaagaagaatatctccctcaccttcagtggcgtggatttgcagcacagtccgaactgcggcctcgacgtaatcttgctcaggttcaggggtgtagaagatctcgaccgggtgggtacgaccagggactgcgagaaggggcgcgtccatgaagtaccgctggaacttttgcgcatccaaagtagccgacatgataataatcttcaagtctggccgacgcaccacaacttccttcaaaagacccatcaggatatctgtcgccatggttctctcgtgagcctcgtcaagaatgattgtgctgtagcgcgacatgttgggatcgttcatagcctctcgaagaagcataccatcagtcatgtacttcatgatggtcttcgggccggtcatgtcttcgaaacggatactgtaaccaacttcctctccaagcttgacatccatctcagccgcgacacgttgggcgacggacatggcagccactcgtcggggctgcgtacaagcaatcattttgccctgagtttgagggagatcatcgtagaggacgaattgcgggatctgcgtagtctttccggaaccagtctcaccaacaaagacaaggatctgggactgttggtagagttgtaggaactcatcactgaataaaatggtcagtatatatatttcttccggaatggctgtcgggcagcactcaccgttgcgtatggacaggcagatcgcgacgggtcttcaggattgagaaatatttgctggaaaaaggtcggccactgaaagggttgatatcgccatcttcggcctttttcgccatcgctgcggttgtctggtgtcgcttgaacttggccagggccgtgttgtcggagccattgttgttctcgtacatgtgagcgaggtaggggttgttctttgggtccccagcgtccatcttctggcgcttcgctcgcgcgcccccttcggaatcggatcggttatcagccatggtggaggtgaaagcaaaaagagtgttgaagggcaaactcgggggagagaagaagctgagataccggagaaaaaaaaatatgagataggaaggtcggccgagcgccacaactgcctatcaggctcaccgccagactattctgccgctctccacaaagggatcgataatctttgagcttgttgacgccctgtgtgtttttggctggacttctctgagccagtttgtctgatgcacgtggcttgtttgcataggactgcctgatatcaagcgtattagctcctctattgctcatcacgagcctttatccacatccctagttccagaccacccccaccattgcgctagacttctgtgtcaatatggagagctacaattcttcagaagatcccgggccagctttctgcgtcgggcaccatgagcacaacagactagttactgtgacccctcgggtcatccaaaacgtacacgagagtaatgttggttctttttcttacctgtaacattactttcataaatgctaacttgatttgatagtatgatatgatgactgttccgatcacgacctctcatttccactcgcgcgtcctagggctattgtcctcttattcggcgactctgcagtcgccaacttacgatgttgttgggaccatggctaccaccctgaacactcggcctgtggtggttccaccgctctcgaaggcagattcgtatcttaccccgaatgatgcaaccagccaattggttggtgtaaccagtagctggattgatctatgctctcctgacccgttgattgcagacttgtcccggcaagttctgatgttggaagttgcgtatgctgcgttttgcggcattggatatctgttgattcctggccctaagttgcatcacggtgccttgcattctgagggtgtcatctactatgcgcgcgcggttcaagacgctctagacctcggtccctacattcaatttcatatttggcagcagatggttgacaacccagaggctgaagttgacacaatgggcgacttggcccctcttgctcgggcagaatacctggtgccagatgagggggatccactcaaggttgatccgtttgggagttgggatgcttgggattcaatcagaaagacttgcaaataccacgcaagactgttcgttggtatgagctaatcctccctttcaatggtcatcgccattatgacaatattttgaactaaagctaatctgaatcacagccctttctttgccgaagcaactaccgtctctgtttgtgcaatcccgatggcattcggaaccagtgcgtttactgacgattgatggctcgacgttcctcaagaaccagaaaggatacccagtcttgtccaagtcacaccaaggtttgatcgcaaagatgatgcgtcttcgaacggcgccatggattatcctttgtggtgttggtcctatccctggacttgagaatgtcgaagaccctgataccaacacggcttcgctatctgggtctgactatccaagtctgtcacaggctggcaagaagcaccacgaccccactccacatctctcgtatattcgcaatctgcagcagcgccaacccccgcggacagcaattgagagatttggtgtgggataccaggactacttgcaggcacctctacagccgctcacagtcaatttggagagtatcacatatgaagtgtttgaaaaggatcccatcaaatacgagtggtatgaaaaggcaatctacaaggcattgagagactgggccgaccagaagaaggccacgtctcacccggacggaaaagtgattctcgcagttgtgggagctggtcgcggcccgctagtcactcgcgccctgaaggctagcgcagatgctggagtggatattgatctttgggcggtggagaagaaccagaatgcgtttgtgttgctacagcgacacaacgacacaatttggggtggtaaggtcaccctggtccagtcagatatgcgaagttggaaaggacctctggtccgacagcagtcgactacggtcgctactggccctgtgggcgaatcccttgggatcgagagctcgttacttgagtctccgaaggatggccagcatgatcggccatcagaaatttctgaatttcaggcgtcggctatgtgccacactcatgtcgatatcattgtctcggagctgttgggctcctttgcggacaatgagctttctccagaatgtctggatggtgtgaacgatgtgatcaaccccgtccacggcatttccattccagcctcgtattcggcacatttcactccgatctccgctcccaaattgcacgcggatgttgtgcaccagacggtgtccaacccggccgccccagagaccccatatgtcgtgatgcttcatgctattgacttcctctccactaccgagacgcctcctagcgctgaaagctccaaccccaataatggaaaccgggcatccaccccgtcgtcgtcattctctactactgaattccccactccctttgtgcagaccgcatggtctttctctcacccgaaccgacacattcctcctcagtcccccatgcagtcgaccatctccaacgcccataatgtgcgccaaacacgtctggctttcccttgccagaaccgaggtgtgtgccacggtctggcgggctactttgaaacagtgctctacggtgatgtggagttgtcaaccaacccggtgaccatggatgccaagagcgcaagcatgatcagctggttccccatctacttccccttgaaggttagtatttttgaaaccttccaactaaacccctcgcttctgtccttcccatcatactgacaacgctctcaagacccctcttagtgttcccgagaacggtgagatcgttgccacgatgtaccgtcaaaccgatgaccgcaaggtctggtatgaatggatggttgaggtttatgcccttgaacctactggggcattcgcaaaacccacccccgtgagctatgcgcaagctgggtccgtcagcgtggaaagcctgaaagctaaggaaaatgccgcgaagaagacccaccgcaccggctatcgccgcgtgcgagtgggaatgagtgatttgcactctagcatcaaggatggctgcttaatgtgaaatttataagccggggttgaataaaagctgttcgagccatgagctccactattgttaacgattactatcacgattgcagttgaattttgccgtttgagaccgtcaaatctgatcatgcgaacaacgctaagcactttgttctagaggttcttgccaagtaaagtacggagtcaccttgcatgtcttggcagggacccgattttaatcaaactaacttcgggctgagctgagcagttcagccctggctgaggctggaagcttccgatctgtagattttcatgtgagataaacatatgtcacgcactccctatattaatgtgattgtatagagtactccttacttggagtacacctggtttcgggttcggcgttgccttacttaaagcacacgcgatctcagattctgcattgccttaatcgccggactgaccggaatgaaataattccccggctccaccaatgcctccaaatttgatctatttcgtcgatcattgtgtggaactgtgctgaattccctcgtcacggagactagtatcgtatttttatcatatgccgttgtttattggttcccccgacaggaaatggcttgcgcaagtgtggaacccattcaggaacatactgtatgaatttgccaggggggatcgaacatataaagccgtgggtccccctggcctcaattaggcaccgcgattgacaacaagccatcatgcgtttctctttattcacagcgctatctgcagcagcatcgttgggtcatgccctccccggtcaactgcaagctcgaggtaccatgccacaaacattgatcagtgcatcttgaccacctcgctcacacccggttagatgtttcgactagcgaactgaaccagttcgacttctgggtccagtatgccgccgcggcatactatgccgatgactacacagctcaagtgggcgccaagatcagttgttcgaaaggaaactgcccccaagtggaggaagctggtgcgactgtattctatgacttctccaagtaagcgacgtccccgatacaatacccgacaaaacaatttacttacacatgcacagcgccaccatcacagatacttccggcttcatcgcagtagaccacgccaacgaggcagtcgttctctccttccgcggatcctactcagtgcgcaactgggtcagcgatgccatattcgtatacacaaaccctgatctctgtgatggatgcctggccgacctcggcttctggggctcctgggtgcttgtccgcgacgacatcatcaaagaactgaaagaagccgtctcccagaaccccggttacgagctggccgtagtgggccacagtctcggtgccgctgtcgcaacccttgcggtggctgatctccggggcaaaggctacccgtcggctaagctgtatgcgtatgcctcgcctcgggtggcgaacgtgcctttggctaagcatatcacggctcaggggaacaactaccgcttcactcacaccgatgacccggtgcctaagctgccgttgctggccatgggctatgttcatatcagccctgagtattggatcacctcgcctaacaatgtgactgtcggtgcttctgatatcaaggttattgacggagatatctcatttgctggaaacactggaactggtctcccatcattggaggatttcgaggcgcataagtggtactttatgaagactgatgcaggaaagaatgatgggaggccgttcaagagggtttgattttcttgtcgaattttgtttaatagattctagaattgctggctgacattaatatgtataataaagaataataatggatataatttccgagttatgcaaggccactgggcagaatgtggtctgagatgtggaattgtgtagaccgaggctatcaatatgatccccaaaacccaactaagcactaataagcttgaatgataaccaattcgcctatttccgggcttcagaggacgtcgagtcggagatccgtcggctttagaccaaaaagaccaaactgggcgatcttagtagtttctggccgtcccgtttgatcctagcaatgtaaagtggatatctcctgccgagcggggttatctggaatcaatggtataagatatggctcgaatctcggatttgattggggatgtccattcaaaatggtgctatatccgaaggttttgttggcagtgctggtaagtcatgccacggcacaatttgtgcccgcacccaccgacttgatcaccaagacaggacacgccggcatcgatgtgcgatataaggaagtgcctcatgggatttgtgaacaagaccccagtgtgaagagttattctggttacgctgatgttggtgaggacgagcatattttctggtaagcattcgcgatagggatgagccccagacatcgactgactagcgcaggtggttcttcgaggctagaaacggagatcctaaagatgtatgtccccacggcgtttgagcattgatcatgtgcactaacaataaacaaggcacctcttacagtttggatcaatggaggcccgggatcatcgtccatgatcgggctattccaggagctaggcccctgtggagttgatcacgacggaaatgtatacaacaacccttattcttggagcaacgtgagcaatatggtaagtttgcactgtctttgttcgccgggactctagctcaacttgtcactagctcttcgttgaccagcctgccacggttggactatcatatacaatcccgattccagcctacgaggatgacgatggcaatgttatccagttgcccagcgaggagtgccccgattatgcccaggaccttgggacatgcggcacatactccaagccagacattgccctagtccctaatacaactgcacgtgcggccccaaatatgtggaagacactacaaggattcatgggagctttcccaaagtactcgagaaatggcttcaacttcgccactgagagctacggggggcactatggcccagtcttcaacggtaaagatcgcaaacacttctaaatgcgactggcgctaatttcagctcagagtactttgtcaaacaaaacgcaaaaaagccccatggctcgattcggatcgatcttgagaacgtccttattggaaatggctggttcgatccgctgattcaataccaggcgtactacaacttctctatcttcccgggaaacacttatgactacaacccgtacaacgagtcggtgcaggccgaatggtacaacaatctttatggagaaggtaactgcgtcgatcggactcgggaatgttacgcgacgggtcgaaacgatatttgctctgcggcggacgacttctgcgcttcgaaggttgagtcgctctttgatatctactcagggcgcgacgagtatgatatgcgagagttgacacccgatccgttcccatacgaattctacgtcgattatctcaacagccccaaggttcaagccgctattggagcataccagaatttctcggagttctccgggactgtgggcaatgccttcggaagcacaggcgacgacgaccgcgagtctgcgacgatagagaatgtgaggaagttgttggaagctggagtacaggtattgctgtatttcggggatgcgtgagatctcccacatgatgagatgactagcctatgctaattcgagttctagcgacttcaactgcaattggctcggtggacaagttgtggctgaggagatcaatgccccagggtataatcacgcaggtttcgtgaacatcaccacctcggacggcgttgttcatggacaagttcgtcaaagtgacttgtttagctttgtgcgaatttacgagtccggtcacgaagtacctttctaccagccattggctgcgttagaggtgtttgagagagtgcttttgagaaaggacattgcaacgggtagccaccatttgaagccacacggcggttatcgaactcatggaaccccgacaagtgactaccgagaggggaacagtacagtgattctggaagtgctggatagcaatacgacctataacacaactctcaatggaccgaacccatctagctcggcttcggtcagattacgcagccgacggttgagaagtgtttgaacagtgtacttgtgacgcaactgcgtttttttgtgagatatgttccatttcaaagattcaaattagaagacaaatggtatggtgaagccatattttccatgtccgagtatatcgacgccgcagtgaaacaattcccagattacattcctccattcgattcattccgttctctctcttgggaagtctcagttcaaggcgacatgatgacacaagtagcgatctactcggtcaggtcagcagtgtcggcagtgtcggcagggtcagcgtcgctggacttctcgtcctgagcccgctcaggcacagacttggtggtggtcttgcgacgcttgggagctttatccgccttcctggaggatgtgtctttggccacgccacgcttggtaccagaacgggacttcttagttggtccaccgttggtgtcctcatccttggaattgacagcctgggtaggagactgcactttcaaaccaagaattccctcaaggtggtgcttagcacgccagtagttggtattggcggatgtcttcttcatactagcgagagtggcaagcttctcggagtcaatctatgaagtaaatgttattagacagaaataggaggcatgatgtgagtctggatactgaccttgccatcgtggcataaagaaccataaatgagcagtcgaacatcagctgccttgagctcggagagcttgtcatcaagcttgatagaggaagtcattttgttaaacttgtcgattggataagtgagcgatgagtcaaaccggtgataatgaacgaaagtggatggatgagaagcgataaagaaacggtgagggaacaacgatttcagagaaccaagaagagagaagcatgcagaggaacaaattcaaaataagagcgtgccagatgtgatgatcggcgagaagatgtactacctattagaaatgtatcgttgtttcggttactgattcttgcaatctagggcatgatatagcttgaacgtttctaatgtttaacgcctggtatgaaacataaattagcatatattatgatatttatcatctacgcacactcacggaactaagggatacttaggaccaagacccggagttctgtgataatatggatatggattttacagactgtacaacaaattgagggctagagttcagggcaaataggaattatactaaatgggtatacaagtaagatagcaatcagcttacttgggggccctcttatacttcgaatttcactagtagtattcactaaatcacagtttcgagattgtatgctgcatgaaaaagagttgcttcatgtgagctcctatcaagataccaattcatttgcccaacttgcagtatatcttgcgaaactatgtagctttctttgatcttagtgatcagtttataagttccgatggtgaaggtgatcctttatgtggctgtgccaactacgctgccctgcgaactgccctgcaagcctaagccacatcagccacaccagatatataaacctccagtaccccttcagggaatatgtgtttgactcatcatatgaaaaccatcctagatttccgataatatattcaccagtctaatatacctcgctagtctacaacttactcgccacagctattcacgcctttcgatgtgcccaatacaagaatcggccaagagaaaggagactttaaatcctccacggctttcctcagtcagtgcttagaattgctcctacaacattgcatgctaatttgtcttgtctggttataggttattgaagatctcgacactatccagcctcagacacgccatgttgatgaggcgctggaaaaaagtcgggactattggtatcgcctgacatcactagctcatgcctatcgggatcatggcttgaatccagagtacacaaaccctcgccacattcttcatagaattccaaaactgcatgtacgacccgaaacaacctatgcccgcccttacggagtttctcctcttgttctttgcatgcaagcatcctcgacttggaaattagtaggaaactcggattgcgacagcattgcgaaagaaaggacagccgatgctatgctcaaggtcggcactagtgttgctattccctatagtttcgaagggaatgccttcaattcttggattggcacaacggaagaaaaaacacactggtccaaactacttggggatcctgacaattggatggtgttatgtactctctgcacgatttgttgaaattcaaggcgagggtgctactatgcaatatacagcctcttagatcgaaaactacgatgaagactcttgcgacctgccggagactgatataatcgattttagggcagcagatgaaaatataacttggtggtggtatgcaatactagctcaacgagaagggtggaaagccattatcaaacgaacccaccgccacgaatttctcgccccgtgggcggtgtcacagacatgcaatacacgtttcgctatcaatcagaagggactctcgccaacctcctcatatacacccttaacctcagggaaagcttttgatgttctagctgggtttgtacagttccataacctgggtagccaacttcctatcgcgcctatgacagccataacgctcccaacacatgaatactatggctcgactgtctaacttccctttccaagagcatctggtggtcaacaacctacgactcccatggatgttattccatcactttggtccagtttatacgaggagctgccctactacctgactctgagctgtagtccggaagtagtgctatctactctttgtggatcattcggcgagcccgaagtcccatgcaatctcgtcgctccctggctgcatccgcttttcgaagagatactagctgagacatctcccacgggtagccacgattacgaagcacttgttctaatcggtgcaatacatcgacctaatataggtgctctttggattgtagcggttgccggcgggctaaccccaaaaattattcaaaaagtaagaaaaggcacgtctcctattaatgcacttggatttccctggactggctgtcttcaaagcttcattaatattccaggttcgggtccatacacgcatgggaaccctgagcatatctcaaggctagacgtatggcgcttactgcatcctccccaaatcgaggatgacgagctgttgtataaaaccaggcctcaaacaccttgggcaccctgggggtcgtgcttaccaaaggattgtgcccttcgagttactacacatttgaaatgcgctcgacatgagtaccaataccaccattggaattggcacttagaagaaggctcggttattcaggatcaggggttttcaatagcacccctttcgacggttacagaatgtccttccgatatgattggtattagggagcagagaaggttccctacgagggaacttgatcaagaggcttccgaagaagccacactgtatgccttcctttggtttggcatcaacggagagggtaaaccgtcggaaactatatatgaagatgcctggctcgagggcatttgggaggaagatgaatatgattgggaagacgaggctgaagatcaagattcgaaagagcctgttggtcaacttgaagaccgagtgaaagcctggctgaattcagtcggctgaccaaattgcagtctttcaaatatggcctttattcctttattgaatatattcaccagccaaggtgcacatctaacttcttgccagacccccaactctagcgtaatgagtaagcttctgcaactgactgataggtgcacagagacaatacataagggcgagcgataaaatgtcaatacacactagagaaacaacgcctatcctagaagtagcggtcagatgcctttcccaacaatgttactgataagataagatcaccagatgccctttttagaataccaagaaaaagcaaatatgtatagtgtcaccattttcaagaaagcggtgtgataataggctgtaggcgctgttgggtggcgcaataaggcgcttcgcccggttgccgcttcgaggccaccgaaaccagcctcatgcaagggatgtcacaaacggcgcgtatagaattcgagtaatcaaaatccgccaagtcatagtatcatggtgcaataccatgaccttgggagggtcgttcgtacatctaatcgatagatccaacctacaaggctgcacgcattccagatcataacggggctatttcccagtgctaacacgtggaggagctctttgcgcagaccatgttgtacatcaatgtagagactatgaatacaagtattcaaagacttggggaatctttgtctagattctaatgggtaccgtaataatgtgattatttacaagacaacctcacgaggcaccgagatcgcgatttgtgaataacgtgcaggtagtgcgtattattatgtagagtctttaatgaaggagttcaaattaagttaaatccaatttgtctcatattaacgcattgtcatggtatcatatcggctgaagggagagagaaagacgctaaagcaaatgaaaagcccaaactaagcgtatcaatcgctaatataaataattctcaacggtcgtcggacgggtggttcatctgcactggatgatcctcgtattgcaagtggtgggtgggaggccacgaatagagcggtagttggtcctgaaataattatcagcctttgtgttcttgctggaaacggatttagattgcactcactaggctctcaatctttgccaacgtaggatcgatatcaatatcagagctccaaatcgaggggtccgtctgctggtagggtgacgcaaaggcttcaggcttcaagatgctccggaggtattgatcgatggcagtcaccgtctctaccggcatgcccgaggtgggatattgaggatttaaaagggattcgcttgcgacgggtgagctgcatatatcggtcgtataggaatagggggatgggtggtcgtgagcggatgcggaagattggctctggccgctggaatactgtgggtatggcattgatgaatccatgattccccatatcccgggataactgtcggtggtatccacttggaatggaatagcaggcgatttggctggttgcgactgcgtctgttgttgcaggctcgactgtcgagatgatctgtcactgtgggcgtatggtatgttttcctttggtgctgaagtcgcactttcattcaggtcagtccacggcttcgattattgtcaactgctggggggttactcactgttggaccaaatgctgggtcaagtaatctggacgatggtatgtctttttgcacccttcgtaagtgcaagggtattgctttttaggatcatggctgagctcatgtcgtctgcggtgttcagctctggtaaagacctgtgtcatggcggtaagcgagatgattcattggcaatattagaatggtacttaccttcgaacatccagggcgctggcacgcatggactcgcttgcccttcatagccttgctcacccggtgagagttttcttgtgggggcgaagaaacatcaacgagaggtctgggataattcaccgtttggcttgcgttgttattgtggttggccaatgttgagggcgtgggagtaggatatccaaagccgaatggcggcgtaatggaggcagtagatgtggtgttgaaggacatattgtaggaaagaaaataagctcttatatggccaatgcggctcaatatgccacccaggacgaagtggcacgtttagacgttgtggaagtcgtacgagctcgagtggggagatgaaagaaaggtaaaagaaaggtatatgggaaagggggttaataagacttttattaatgccaacaggtcaacagctcgatgggtgggtgtgtcggacggtctcggtcgtattggatgccgatctggtgcctaatccaaggttataggtacatgggaaagtcgttttcgaaattaagcgcttccccgtctttttccaccgtgtacctaagaaggaggaggagatatccataaaaatgatatttcagaagacggttgaaaaaaaaccgaaaaaaccaacgcgatgacaagtccgcataatcagcctgctattcttgttaagaaaacaattaagaaccaagctaatactaaatagtccgtaaagaaaaagtctgaaacgactcagagcacgcctagtgattataactttcacctagcggggatcttttggggccaaaagcggctgaagcgacgttcggtgatttccgataatgacgggcatcacccccagtcaacaatcagagcctcaatctcctggatcggtcgctcacgtagctgagctggacatctctacaaattcatcttattgggttgtgatatgccccactaggtgtggatcattgcgatgtagagcaagcggcatgacatgttacaacaacccggcaggctgagtcgaaattcaaaccaaccaacacagaagtatatatgtgattggctcaagtacactctggtctaaaaaaaggaaaaaggaaaggtgcgagtcgacgtatacccgaatggttttgattgaagaggctcaacacgccagagacccactttttccacttggcgtcgattctggccaatagaacgtcggtattgtatccacctgggcaccgatccagtctccagtccgaccttgggcacacgggtggcttctatcactctactttatatgcacttacggacttgatgcagcgtaggcgcattgtcgcatgtcactttggaatgagacccggggagatctagctttggagtgttacatcgggaagctgcggtcttagtacgtggggttcgtacgtggggtatggtgggggctaaagcatattcccggcaaaattatttggactcgggaaatagtatcttgaacttttagtcgggtgtgccttgccaattgagaagcgggtcaaaggcttcaagtggtggtcagtgcacatgatacttacagttggccgttcgtcctgttgaatattcatttagacgggatattaagtagtgatttcattagccatgggaactgcgggggcaatcgagagagtgaggatagcacatcaattggactagcttattgcattttattgagacgctactcaggtcgctgactgatcaggcgctccggggttcaattctactcagtgatcaaaaagcggcgagggatgagtactgaaacgaaaagggaagaccaggaaattgcatagatcgctttgatatcaaattaaccagagtaatgcatcttcggactaagttcgttttccccatttcttcgcatgtaaatctgtcaaggcccaatttgcagagagataatcaatgggcgaatcggaaatccagtcgcttatttccttcgtccttagtagtcgccaaatagttcgtcttttcgttgtccgtcatagcgttccatttcttgtcccggctttgattgcgccagacatagtataccttggtcaacaagtatatgaacacgttggaaacaacgagtcccaccagagtaccattgcctctccggtagcggggagcatcatctgatccaaattagaataccgagcaaatgtaaaaaagatgaggaatttcatgacctaccagcgcgatagatattggaagcaataatccccgacgattggacacacatgttatacatggcagccgagaccgtgcgggatcggacagtgtttgagttgcgggagttccagttgacttgaatagcatgcgctgtgattttgtgagccatgatttcaagcagatttgaacaggtgagcttaccatttggatatgacaatagcagagttatcaccgcccacacgcaccacttgttcgcggtgttgatgtcgatcacatataaatagaccaagaaaggaagcatccatatttgcccgatcgtagacaccaaagtcaattggttacaaatctccgatgcatatgtgaggagtaggaggaagataatagacagcacttcgctaggaatgaccaagagatttgtcacgaaagtgccgaatccgaggcctttcagagtcagagttaggtattgcttggggggcaccactggtgtttggaaggtaagtccgatgatgtataacggccagagatcatagtccttgagacttttccagagtagtttaggtgtaataggttctcgattgtgcatggttcctttgcttgggtcatcacgaattactcgattgacgatgatggtttcctctctgtcaatcctgtcaataacgatccggtttgctataagaagggagataacttaccgggcagtgaaccaacccgatttaccccgagaccaattagcagtctggcatggtcctggtggcatcaggatatatgcagatagaccaaatagaagtgtcagaaggccctgtcttcgatgtgagtaatgcgccgattgcaatcaaatttaaatgaggtggctactcacctccagcaaaaacagccagcgccatcccgattgaccttgcacaccacgaagatgtaaaaatccgaatgcgaggaatgcagcaagaatatccgcaatattcatggccgtccaaaagaaaccgagtcgtaaagacagctcatggtgtttataaaagtaggacagatacaatatcacctttgagtctgttagcagtgacccgtaaccagaacacgaataacctacatctgggataaacccgccttgcaaaatacccagcagggcgcggcacaagaggaaagtcgttctcccattcagaccatactgtgccatggcaactgcagaccaaagaaccatttgggtgggaatccaccgatcaggtccaacccatttgctgacgagctgagagggaagctcggcactgaggaatgagagcttgaacaccgtatttccaagattgtagtctggagatagaaattattattgtcagccctagaatatcataagataaaaagataactccgatgctttatttaccatttgtggtcatgttcaactcgggaagcatgttgtcggttagagcttgtgacagattcgaccgatccaactccaagcacatgaacatgagacacgcaaataccatgatacggagatcgatttttcggatcaatttgtattcctcgttccatgtccaccgagccgaggtgtcaaatcggtgaagattctcccagtcggctcgaggttgatattccttcgcggtgtccgggttgtcaaaaacggacggctgagtcgcaattgcttcggggttgtagtctttgcctcgctgaaaccaaaaccgacgttcatctcctggctcacccaacggcgggatgtcaagactggtagatgagtctgtatctgtccctttgagtactgttatagactcatccgggcctttctttgtgctgtatacagtggacatcttgacaatccaaagccaatgtgggtgaattgtcagaataatggaacctgtcgttctacctttaataaatttggattatctggactccttttatacatccctgcagcgacgatccaatcggggtatattgccttgaacatgaatttgctgataagagaccacttgaaactggcttgcatcatgaagccaagtatggaacaattcttctggtgtgttgtgagaggttcgggttcagggccaagaaaggtcaagagggttagtgggaatggcatcttgatggctgaatatcacatcattctgtcgaaaaaccacatcttgcccagtctaaaagcaaactagaattatgttcaaatcagctactgaggtccattgaacagctgcgtttaccgagaaagacaaattgccaaataccttgagattattttgtttctctgcaaaactactcatcggtgaacggcaccacaaatagaacatatatctcatattgatcgcagcgtggaagcctgagaccagttataaggcaggaccttatccattgtagctacttcatgatgtcgtttcatcgatgatgcgaattggaaccctcaggagcgatttcaagcgatattgacagaccaatcaatctacgcgtctaagatggacagcaagtccggaaagcgtgattttgcctttcttagtcttggtatcgtctgtattatccacttcgatcctaccgtccttggggtggcaagcttcatattattcgaaatttggtgggcgccctataataaaaatgggggacagggcaaatctcatcctttaatctcagaagaatcatgatagaagaactctcgacgtatatttacttaggggtccatttgagtatgacttcgcttttcaccaagtctaccttatggtgtcattggcccagtccgtcgtcttcggaggtagccatacgtcctcggctttttgattttcataacaattgagagaacgccaggtaaagactataacattgcggatctataaagctacggaaaggcttcaagaaatctaccgcggatcgcttttcgtgactcaagatctagctcccagaattcttctgcgcttagaaactccctggggacttagaccacatacgtgacataacctccggtcgatattatcttcgccttgctttccatcttgataagcaaggcaatcggggataacatcgcattccaatctcttgagcgctttcagggtcgtcaattcaacgtgcgactgtggcttagaagcctgatttcgtcgaatctgagggctctgatattgagtgccaataacaaaaatttgaagatagattttccttgcgatggccaataaacttagcagctgtgaacggaagtccaaggtcaccggtaacatcctgctgcgtcgtcaattgagatcgtccagagagcttattactatcgatggcccaggtttggcggggcaggtggagaggcggctcggatggtgggtggatcgagagtgacgtccgtgccttcgaggccgcacaggaacgaagcggttttgggaatgttcatgctggcttgatgagttttggaacgatggacatattcttttggcgaatgaaagcctagtagagctggcgtttggataggagtaaagaagacgagagttgttgatgggaaaaatgatcatccactaaccggccccctgaaatttttcgagtaatcactgagcgagcagcgagccaatcatgctctctgatttctcagtgagcggtcatttggcatctctgatatgtcacctgttggagctgagcaggttactcggctgtcctgaccctgagcgccctcatgaagcggcagctaagaaaggaaagccccggcagaggaaagattgtacgaagaggtcccgaggtacatagtccgtcggctaagcgttggtgacttccctttttgttgcgatgggccggaccctatgtacatggcgtgcttgagtgcggagtagatgtgcatatgtacatccagccaacaaatagtgaaggaaaataatctagaagtccaactagttatttcggattgatcagattcagcacatcttccggctttaactgctgtaggaatagtgtcgtttgtaatcaagattctactatgttgcaacctctagtagatatgatcccatcacggtgacatttccagatggcggcatgtcagacaattcctgggggaaatgacgaatatcaactgtgacagcacaagttgactgttatctatcaagaagatcaacatctaagacgtgctttcgctctaactgtgcgacagcaatgttccagaactgcggggctacgataatgagggctgggcaccgcagcagacagatgtcgcaagcggataatcggcaatacccagtatgtcacggagtataagattgatacctggtcccagctttcatcttctagcatcaagcaacgctatccaacaactgctgtatccaacacccttaccatggcatccgctgtcacccaaaccgcacctacggtggttcccgttgtggaggataagattacgctcacgggtctcgcacgtgaacctctcaagtccagcggaactctcgatgctttcgaatactttgatgtcactccagtcattgggcgcgaattcccaaatgccaacttgaaggacttcctgcgcgcccccaattccgatgatctgcttagggatcttgccctaaccagtaagtcgcatccgtggctatgcgtgacagatagagctgacatgatatcccagtctcgcaacgaggagtggtattcttccggaagcaagatggtctagacaatgacctgcaaaaggagcttgtccaacgacttggtgaactctcaggcaagccaagcacatctggactgcatatccacccagtagcaaactcgggtcgggaacacagcgtcaaggacgatgagattagtgtgatcagctccgcaagccgggaaaagctgtacgaaaccagaaacaaacggaaacagactgcgcgcagagagtggcacagtgacatcacctttgagcccattcctagtgattatactctcttgcgtcttaccgagcttccgaaaaccggtggtggtaagacctcattgcgtcctctctatgagatagtccagggacactaatcctcttctagacacattgtgggcctcaggatacgaggtttacgatcgcatctccgaaccataccagaaattcctggagagcttgaccgcaacctatgcgcaacccggcttcaacgaagttgccaagcgcaacaatttcacaattcaccttggtcctcgtggtgcaccggaaaacgtcggagaagatctcattgctgagcaccctgtcatccgtaccaaccctgtcaccggttggaagagtgtctttgcagtcggtacgcacgtgcagaaggtcaacggtgtctccgaagaggagagccgccatcttctcgactggtttgtatctctcattgttgagaaccacgacctgcaggtgcgcaatcgctggcagaaccctaacgatctcggtatgaccccccggtgaaattttgtgatggccgtatctgactgttggtatagctatttgggataaccgatcggtataccacgcagcgacttgggattatgacggtctcggtccacgcactggacatcgtactgttgggctcggagagaggccatatctggaccccaagagcattggaagacgggaggcactctccaagagcgaataggtatttttataatccgcattggaagatcggccttctcgccatgcaatttaaatgaaactcttgttcttgaacacgattcatatgtgcgacacatagtatccaatgtctacatgcatttcctcaaaaggttattccttgggacaatccacccatgggtccatttcaggccttgagacgcggtgacctcagtttcctagtacgttaatatttaatttcctgacctcgcgaacaacttgataaaatggcggatgaagttagaaaggagttcggagctagaaaatccccgatcatagcaagattctttacacaaattcaatcaaaaatccaaatatagaaggcaataaaagagctgtgctgaagccatatcagtttatgtacatcaagccggctgggagctgacaggtgaccataccatgcaaacagagactattcccagggctacataggaggtaaatcaccaaaagacaagtttgggtcccggattctagaacccttcggaataatactttctcccagcactctcatgttttctatccgtaccctccggggggaagtcacgtaaatatgggccttggtacctcctgggttgaggaagagtgagcaatggcatggatctggctttgtctcgccacttcctgtcacggtggttgaatcgtagcccctgtagaataattaggatactttatggatgtgatcgagcctaggatttaatatggcctcatacaagatgcggacagaggttttccctatccttcgagcacatgcgacagccacttgctcggtggcactcttcaatacattcaattccgcctggtaggttgcagcgcttccaggtaggttgaaaattgcgtttgggctccaaaagaaactgataccgtcaagggtacccgaataggactcggcggggatggtgttctgaagagacatggtagaggtgagaatattaacgagataaaatgccttaggtcttttggatgtgaaaacagagagtcaagattgatggttcctcttggatgatgtctccaacgcctatatatatatatatatatatatgtagaaagtctagccagcaggggccattgaggtcaaagataaaccccgctactttccctcttagagatacgttgcatagccaatggatacgcgccgtacttgaagatcatcatgtcagagctatcagagagcttttgctttccaatcagtttagtcgcacggtactacaaagtacaagtgtttcatatctcaagaattaatcattcaaatcccagagcattagtcttattgggtatagcttgttttcgcgtgctgctttgatagtgcaattatgctcgtaagcgctaggacaggacaggcccgagtttatttctgtcagtacgtatgtattgctacatcgtaatctatttttatcttgttttatcttattttaatttgatctcattaggtttccttttgactgggggcggatcggcatcgcatggctgcgagtaacttttctctgcgactgttcgttggagaacatagtattcgccccatttgcgattcaactttcatttcaacgttgtctccgattaatgaaagggttctctaaacgcccaagaatgtaaatgtgattgttagggtttcaagtctcaagaaaaggtcgatttaaaattacacaatccctgggaccacgaccattttgaatctgaagaaaaaaacctcactattaaaccgattgctcgccgacctcgggagcattgaatcgtgtcattggttgtcccttaagactgtcaagagaatcatcatgtttcagcgaagcgccactagttctcacaagtacgaacagaagcggcaggaattaaaatagacagcggtgatcctgggcccaagcgagtggtgacatccagaaagaagggattttgggctcagcgcatgaagttgataatttgcaggagccaactatcactgggcggtgtgacgaattggcacttatacaacctgatctccttctgccttaagactcacctaatcttcttcattattcatctactctgccatcgacacattcatctgaaatggccaatactgaagcttcccctgaaaacacgacagattttggtgactttgtgaaggatgaagaagaggaacttgatctcgaagagcttgttgagccatggtataggtacgacacagaggataaccaacatttcctctatcctattcaccttggagaagtgctcaacgacaggtacctggttgaacataaacttggctttggtggtggctcaaccgtctggatggcatttgacctacaagacaagagaaacgtggcccttaaagtcatggccctagggcaatggggcgacaatgaaactcgaatccaggatgagatcatcaaaacagtacaggatacttctcgcctggttatatatactgcgactttctttctaccccgagacgataaaagttgccatagggtcttggtgttccctgtgaaagggccatccatctgtactcttaccttgcaaaagattcccatggcctctcgcatgtttgctgctcggcaattactagggactgtggcaagcttacaccaagctggaatcatacatcgcggtgagtcgacattctcttgtttgattttcttttatactgagaaaaatgttatagatttgaatgcaaggaactgtatgtggggaatagctcctttcgatgatcttagcagaagcgctaagtatgaattactcggtcggcctttgaagcaaacaataccatttgtcgatctgtggaaaaagggcgagcttgtgagccctatcaaatttcccgaagaccgtcgcacagatgaattctatctctgtgattttggtttagcaaagaaagtaggcgatctcactagccaacgtggctacccacctatgcattattgctctccagatcgacttcataagcaagagccaagttttgcttgcgacatgtggagctatatggctgttttctctatgctctaccttgaatttcctccgtttcccacatttatcgaaggtggagttgtgagtggtatggttgaatgcttaggcccactacctaagcagtggaaaggtctctacaaatactccgacggccttgactcatggtatgatcagtctcagtctcctgatctagagcatgaccttgctgcgaaaattgcttatttccgtcccgattctgatccggtcgagcggcagcatgtgctttcggtcatgtcgaaagtatttatctacgacccagaaaagcggctgaccgcagtagaacttttgcgagatccttcattcagagccatcatggaccggtacaagtgctgagactcgagcactcgaagagcatttgcattttctagccacggagcgcaagaaataatctgcctggattgaaatagcttgagtcaagagcgggacgtgatgagcaaacaggtgtcaagctaaaaaccctcgtactgctgtcccgttagctgccaccgaagtcaagccgggatccctcgcgagtcctgcgatgcaatcggggccacctttgtctcagctatctaaacactgtcgctccaagaatacctgagtatctatggtctcgtttatgataacgataatcagcacgtgggctatctcatatttgtttccacggacaatgccgccaagactaagcgtgccgagcgcaagggtaatagcgcgaatcactactcgatacatgaaaagaccaggggaaaaagcatcaaagtacaacataatactattatctgaggcgcctcggtccaatctttagtacgactgttttacccagtgccgttaccgttctggctcctctcaatctcttctcttcctgggttctcccttcaacggtagacatgcgctgtagtaatttgctgtgtttatctaaaaggagtaatcttttgttcaatcacatcccgacccaccatataagttttggctacttttatgtatacatgagcttgatcaagttttatacaatccaacctccgaagacgtcggataagacgatcttatcatagaaactcccgcggggtcttattggctgataagcacctttctcgctggctgttgcctcgtttaagataagcataaagcatgccactcccaagtccacatataaatgtctggtgagcccgacgaagtaacacaaaccgattttaaattcattatccagacacagaacataatgcatcttgctattcctcccactcctattcgcaatcccgaaaagggcttcaagacacaccctaagaagacacgaactgagtctatctcagcaattgagaccgaatctgcacaaccctcttccgatggctcgtcagaaaagtcccttcggtccattatcaaaggtgagttatgtatgacttatttttctaccttcgcttacagtattatagcctttgtttctcgcaccagaatgtgaagacggcggtatctggcagaccaaacatggtctttgattgatttactttcttttgttatatatctggcctctcatataccttattcccctctcgctcttgtggacttctcattggtgtgtgttttacaagtaattactatactcctatcatactcgttgagcctttttatcacaattcagtgcatgacctactcctacttaccaaagaccgggtatgtgtcaaatgccatcaactgcacttgattctcacagctcctcaatattgtcgaggtcaatataccagctcaacttgaggaatcactatccgatgaggatgaggaaacccattcgccagggtcagactccccttcatcgccccagtcccaggcggcgccagcaagaatggtcctaatcccagtaatacagttcatagtcatcgtatcggaagttggatgcttgtggcacagaattttgaatactttgaggcttggggtttgttttgcaatctcagtacccgtcgcaatcatctcactgtataggctcaaggctctccttggctcattacagtgatgactaaatcctgcggagaatcgatcgacatcttggagactgagattgatgataatactctcaatctgcaacggcatagcactgtcgccctgccgaaattcaaaaatctgtggacaaattctacacatgcgtaagcgcacagacctcagtgaagggatctgaagcgccagctgaggacgaatatgtatggcgctgttcatttctgatccgtaggtaccaggccgctcaagaattgagttgggtcccatgatgaaatatattgctggcgaggaatcagcggattgattgggtcgaagtggctgcggacacgtaaagtgaaagatgttaaatgattgctccgtttagccaatgaagtgagtatttcattgaatttcgcgagatcctgctcagcgggccagtccttggggctatgcgcatcaatggtgagctgtcgcaaaaacgccctcaggtttgaatacacgttttcgggggcatgtaccaactgagtcgcactcagcttcaggtcctctagcaggagcagctttgcaatctgataccacaacttgcagaccaacaaacagcaaacttcctgtttgcgaagctgatcgctacctataaatcgaatgatgatacatagtatctcggatggtagggtttgcagtgtcattggaggaatgtgtggagaagcagagtaaccgcgagtttcaagagataccaagacaaacgcacaaactgcacaaatgctgggtggccggcaaggcggtcacccagtgggtccagatcctactagttagcagatcttagatcttagatctttgaatctttaaatgtttaatctttggactgtccaatatttcattagtcttcagttttaagggagatcgcttattatcttggccgtaatcttgtttccacagtatgcagaggatgtacatccagagcctgcatatacagatgcaacagaatccgacaggtagctagttccgtccctcctcttctttcctctcctgtccgtccatcatcattctaccagaatctctcttgtctttctcatacgagttcatccaataagtagatctctattagcaaatcatccgtcgatttctaaaaggcaaacaagaaatttgctcaatatgttagcagacttgaaactttttactctcacaatcatcccttacagtgggtccttctttgcacatgtaactcttgacagcacctattcttactcgggaaccgttggcagacttgaagtgaagtgagattaaaagaatgcaaataacatatctcaactcgtaattctgttcgcacagtataacttgtccactcctcaatcttgttgtacccgttacgggtgtatattttcctgccttcctcgtttatctaggcagttgcaattgctttccaactcgagaagtgagaaagcggagctcaaatatgctcacttcctactttagccgagcgtccagctgatttagataatcctgaatggtgactttctctggatcggtggtcataaaagcatgagcgatatactcatccgctatcaaactcgtcagctccacccactttcgtgatgcggaataaattgacataccgtgggttttcaactcattccaagcatcaacaatcgttttcagctccctgtctacaagtagcatgggcggaatctcctgcttgtcactttcaaataagtcgtagactgtagtaaggtcggcggccatcagagcccaagcgccctgaagcagctcgagcgtttcgacagcaggtccaatcacattgatgatatctgtgacttgggccttggaggcaggtaagtcactggtgcaaaacaactcagttggcaaaaggctgtacttactcccatggattgtatatcgccttgtagccgaacagcaatctgtagcttttctacatttgcatcgatcgtctcttgaatctttttcatgctcgcctccagccgtttgatgtcactttcggcgagaatatcaactgtgacaccagcaatggtgccaatgaacggtctgtttttgatgactttaatatctaacctctggtttgtagggtacccataaacttacatccagacgtagtaggcagtatctttgatcttatcgtggtctgcgagtatgtgaaggagttagtagtgcattctagcgaggtaaaggctagctcttcacctctgtcaatagccacttgtaggtcctggatattcttcctttcctccgcaataacagccgtcaaatgctctatatcattaccctcctcctcaagaagcgattttaggctcttttcatcgccctcgagagtagactcgtacgccttacagtcatcatgaaactgtttcaaggcactcagggtctctgcgattttgtcctggatagatgaaatcttcttctcctcgccgttgatagcacctttgatactcgattccaaatcatcaagagtcttttgatcgggggatgccttttccatttcgtcgttatactgtccaatccattctaacatgcctcgataatatgagctgtcgcttgttccccctgctaatgtggcatatgttttgatcgtacccgagaggtccacaaggccattccaggtaacttcctggaaggtggtacaactgctcgacacctaatatgcgagtgggagattagcttgtatattctgtccagccagctagttacattgtgcacgagctttgacttccatacatacctcggtataggttccgagtaggttgtccacctctttccaaaccttgtcactcatctcgttggtgtcagtgagacccaagactctgatgtaggtctcgcggtcggttgggagcaactttccagtccataggaatctactgagagctaccatattttcatcatccaagaggaatgtcttgtcgtcatcctgctcggcgctgaaagcagtaatcttcttcgttttgttgtcaagaaataggccctttggataccagacactcgggtcattgatgggctttgagggatcgaagctggtcatgattgtcaggataaaggctcaatgtgcgttgataaatcctatattgaggaaaggtgaagaaatgctatctcaaacagtgtcgacgactctgaaatagaaggagacgaaataatagcttacatggctttcctttataccctggtttctggatggctacgttcggtcattttctcaaatggcggtctatctcctctacagtcgtagataccaacacgtgcttctctctgcctgctgtccttctttctggatgatgagctcataggttcggagaacacggtcatatgataaggagtaaataatgaaactgcatgtactatatgaactcagcttcgggtatctatacagacaatgcgggccgagcccttgcattgcgctattgttaatacttacatcttctaaaagcaggatatgtgtatgttgatcattggggggaaagaggggggtagtatcaaggtcgtgaaacctgcatcgggaactccgacaatgcatgcagggatcgacagtggatttcgcgtaatgactcgacgacctcgccaggtatccatctgatatagatctagcactttggatcaactcatggctaattatcgatgacgaatttcttccaagaggcggagtttggggtaattttgatttccgatatgtgcagacggagctttaaccaatttacagaagatcggttcataagcatcagattcgtagagccacaagtcataccgagctacgaataaacatccttgttcaatccaatttagtcctacaaaccaatacttcttaatccgaacctctactttatgttgacttttaaagtctttgtggcccaacaataaaccaaatcacacagtatttattgatttcaagtattatctcattaaaattgaattattatagctcagaacagagtatgtagtaataggtagtttcgattcatcgcgcatatctaggcatcggcagcaagcaatgtgtcacaagttctgatatccttgtaaggcccgcatgtgagttgggactagcccaatgaacgaatacgggaatgcagcttgcaaaagcaattttcaggctcctctgctagccatgctgtactccgtacgactctccacgatgcatgcatcttcttggggcgatagtaaaagccttggcattctgcctatcaggctggagtgtcattatcgaatccgtgacgttgagcgatttactggtcctatgtttgcgactgcggattgattacgcctcttcacacctaggacatcaggtgttccatttgcctactagccaaaatgattcgtgctccatggagaaataacccgaccgtccttccttcctataaaaccctgcctgctgtttgctattcttgtcaaattcaatatcagttctaattcacttcctcggagaagttgtcaatatgaccaatatcgcaccccaaccgagcaatccaagccaatggcaagagtggtatgccacgctggacgatgtgctcgatattcccctgcaagcagcagactatgtgaacgaaagttcggtaataaatctagcgcaccctccaggtattaacctatttgcgctatcaactgattccagtgacagaaacttgccacccaccgaggcattctccttgatgcacccactgtcctcgatttttcgatgcacaacctgtacatctatgctgatgttcttgtcttcccggcgagcgaaatcacaatttctcctgctgcaagcggtattgtgcagatcctagcccgagttctcactgctgcggctccaatcactctattgattccccctggtgatgcggccacatgtgcaatctcgatctatgcgccagttttagaccagccgatatcagtccgcacgggtgattctaagccgataactctggaactcggcccaacgacagccaacgttggtgttatcctaaccttttctggcggagaggtgacggccgactaccagaaaagataccctacagataatcaccccgaactgcaggccagtctagagactgaattgcgcaatgctctatctgggttttggaaaaatagttcggttggcatttcaatctgcgcctatgttgcagctatcactcacaatcagaaggcctattcaatgctgaatactcaggccgcggcgttgggtcagcaactcgcagggcgagcaattgctggtccaaatatgagctacgcacctacattgcctcttgacacatacgagaagactgcaaagttagcattagctgccgcatctgaatttgacgaagaataccgaaacttccaggacaaggcggagtcgctggaaattcagatccaggcgtggaaggttatgctatctcaagccattgccaatcaaaccatgcggatcaacttgcgtgactcggcatttgacaaatatcagtcagctgccaagtctgcagcctcttgtgagacgcagttccggtatgagaatgatgccgtgaagagcgccgagatacaatttcaacttggaattgcggaatgggagttcaatcaggagcttaaagctgtatttgagatattcaaggctgttatcagtaagtcggtcaccttctgcttattctatctatcagtttagtcatgcgattatccaggcttacatgatatagcttttgcagtcaatatcggcgagctgtgtatcggagaccctgctgcagctggcggagcagagaaagccgtggatggcgccgttgaggctgttgaggaagcagaaaagattaccggccagatcgaaaagatcatatcatcgataacattggagaatctgggaaaagctgcaaaggctctatacaaattgtatccgtcggtggtccaggttgtggatgcggtaaaggctctcgagtccaattccgacaccgagatcccttccatgggggatatatctggcacgacagagggtgacgctgattctgctgctattgtgacactagcggcatgggatgtatggattctcgaatcagatcaccagatggagtttgcggtgaagaatgagattgggggtgccagtgagtatcagcttgcattgcggaagcatgcgatcaatggaaagcaactggcccagacccaggctgaagctatcaaggctgggtatgaatatgtccaggctcaaatggaagtcattgtctgcgcaaagcaggtcaatgatcttcagggcttgatagatgagtatacggggcaggaggatatctacctacaagctaaagttcagttatatgatcggctaatggcacttcgaacgggtgttgtgattgaactgcagaacatggtttgggcatatcgatactgggcgctcgcagagagtactctagtcctcgatatcatgaagtcagtcgacgagtacaacagcgatctgtacaccattgcacttgccatggagacaatcgacggacaatacggcagtgattaccaaggtaattagcttatccacccctctctagggctaactgaccgttctgttcgggtagactttgggtacgatcacaagtccgaatacgtatgtactcttgatccttgtgagggttgccaccactgactggcacgacggtagcttcccttggactttggctctttgctgctcgagggcctcactagtgaaaggcacaccggtagctttaccctcgcaccggaagaagccttagccggtcaattcgttgagggctcccactaccgactgagtagcttagacctgactctcatcggagcacgccccaaaagcgaatttctggaagacggtgtagtgaaggtttctttggagatcaccacatcgggaatatacagcgatatcaacaaggatcaggtctttcactttgccagcgtcccctcactcgttcgttgttcttatcagctgaatgaagagggcgacagagggttgacattggaatatcctgttttcaaaaccgaaaaccatgccgagcccacaccttttacacagtggcagataaagctattgcatcctgagagggttgatttgagtggattgacagggattaatttgaattggaaaggccacgttcgttttgatccgacgagacgatctaaagaaatatcgatggaggcttgagatagtagcaagatagtggatagttacctggaatttgtatgtaagccagtaacaaaattaagtcacttttttcatatcaactgctttatcgtcaaggggctaaattctgtaggaattaggtagaatatacgattttttctgatcaaaatgaatgtttttttttgactatgtagaccagaagtgggcagaatatatggcagaaattatggcacccaatctggaaggcggtactaaattttcggggggacaacccgagaaaattgcctgcgctatgaactagacagacgagacaatcatctgcgacttgagctacgaaactctttgttctctctcaaccatatgcctctgcaatctttaatagtcagtctatgatgtatttgaaaattttgtattgacgattgcacagaacaaaaatttgaagctataggggattaaggcaacttaggcataattggttaggcaaaggaaacaagactacatctgtcaatctgacccataaactccatacctcagccactgatatgattccttgaacttttggactgcatgtgagaaatcaggtcagcatccgtgaacaatgacagacagaaggatttcgtcataccttctactgccagatcactccacatctccagtagttcgttttcttttaggttgagaagaggcccaggccccggctcggtgttctcggtgatgtactcagtcagtgcagtgagatcattgaatatattgtatgccgcacctaacgcatacttgtcaatctcaaacccagcaactcgacaggggatgagcctaccgacagcgagctgcaggtttgccaacgaggcacttgagtcattttgcatgttctggtttgcgatgattccctattgaatctcactgttagaaacagcgcaaaactgaaggagcggttatatgcatgtggatttatcgaacttgcattcaggatatccagtgctctgcagtcactttcgaaaccctcctgtccatttatgtcaccttcgtgacacttgcggagtcggtcgatagtgtcttgtcgccctagttcctcaccgacttgtttgaccagcttttgtccctcggttacgtttccgatagctgccacaaggttgtcggttgtgctcgtgcactgtttagacaggccatttactttgtccaatcggtctttgatctttgcctgaacctctgcacgcagactctcgttgtctgattcatcgtcgtaaagccttccgaggtcattgaatatctcatctgttttgaacaaagcaaaaagactcagcttaagaaaaaaccaaggaatcaaaaatccgggctattcctaccataatcctcttttgctgtagccgaaagtttgagaatgtagtcacagatatcccccacagaacgatatccgccctaaagcaaacgattagattgattggcattgtcaattatcttttccatacctcaagattcatagactggctggtaatctatcgacgtgtcagtaggtgggtgtgagaaaaggtcagggataggcctgtactgtgtaaaagtgttccatgaccggaattagcaggtctacatacagctataggtatctctagattagttgggatcaaagggattagtttggtagtccttattttacctcttgccttccctgctctgtgaatggcactctatagtcaagcccagaatcattatagggtaaattctgtgttgcctgggttgcctgttggagcttgaagaaactcgggccgtcacagcagaaggttttgctgttggtgagtagatcccttgggctgaggaaggattcatcgaacgacatctctgtttttcaaaagtagttgctggattgaacattcgaaaagatagaagacgaacgactcatttatatatatcttcaacgacagaaaatacaaggttcatttgttggactatgcacatatcttcgaggaacaatgagtaacgcatgataaatgcaccgcgatatgattttattatgcatgtaagtctgcccaagatgcaactttctcctcaatacggtaatctgcatgcatacgtgaacccctctgcgtctgcgttgatgatcgtgtaactgtacggaccgtcgtacggatttgaaatgacctatgacagcataggtgagtgttcaagtctacaaaaaggaccattttatcaaccatgagctctatgtcggtagccaacagcgtctatagtcggaaaatatcaaggttgttaagtggtcaagccagcgtaaaaacgccgttttccacttaataacagctctgctttgcccatattcagaattcttagaatttaatatcgtatctctcgttgcctagtgtttctagttttacttggtccacgaagccagagttgaaggccagtgtaatgctcttctctccttgtcgctgtttgatgcttcaaatgaatccattctacgtctggaatcgactacttctggggcttttaggatattaaaagtatatcaacacacaattaattattcgatatagttttactgtccataatggatgaccgcagctgcggatcgggctatttaaggcccgagaatggtactccatacgtagagtgacttggctacgatgcacatgcgttgttctctttgatctcctgtatttccctcaaattccctactctttgtcattctcctagcccctatttgcaaaactcagactagattgaaaaattctctattgaaatgggttctatcgaaaaacactggatatcgtttcaagacatgaaccctgagagcaaccacaaagaagataaaaaaagtcctcgaaacagctaatttcacccatctctgctctgaggcttcaaagatccgccaacgagaagagtccctagattcgctgatattcgccgctcaactagcccgctatgtctatgaacttagcactctccgatttagcaagatcggctgccgctcgtaccccgacgggtccgacgagcttgaaccatcatcattccaaatctcagattcttgggttggactccgtcgacctcattgaaatacttttatctattccgaaaaggccagacaagggaaatccacgaaaaacacaaaggcgaagcaaactgggaagcagccgtttggttcctcgaaaagtcgttgacatcgatggtaacggaggagcatgtatatggcccatttccattgtgtcatttggaccttcacttcaataatatgctcgttgatgaagatttcaacatcactgctatccttgactggagcaatatccagactgtgccgatggagcgttttgcctcaaacccggaatccattgctcctcctgccgcgccacaggagtttaagcaggcggtctttgacttccgcgatatttttgttgatgcgttagcaaaaattgaaggggagagcggtgcctcatcgtctgatggaggaattccattatcacggctgtttgcatcccccttgtctgaggtgctttttcgatgtacttgtagccctgcacggagagctatcttcgacgctcagctcactctctctctaacttatggtaaagatgctaagtgggaggatttcaagagattcttcaatgaccgtttggcgtgactcgccagttgaggaaggtgcattgcgaataggaatattatttctcgccaacataataaaaaatagaggcctactaaagccacaagtactacagcaatagattagaaactgtcaagaacaactggtattgatggctgttgaagctgaatgcaaactattgacattgtatgtcgagaaatcacaataccagagagaatgcaataatacatgacagtaagattcttaaagaagggtagggggattcatatccggtgagagggtagtttgtttcacccgctcaagagccgggactatgacatcgcccttggcagagttagtgatctggtccttgacggccgaaggattaggcgatgtgcctggtgtgcgttcgcccttgccatggcgctggatgagaccgttggtgatgccgagcacagagtcgacaatgacggcgtcgattccttcagagacttggtactgtagggattatgtggtaagacggttgtttgagatttctagggatgtgaaaagaccataacttacgtcgacgttcttgccctcattgttgagtgttccgtaagagacacacacaagaccggactctttgacaattcggactagtcgtgggcagaggaccagtggttcagcctgggtgacgattccaaggagattccaccgtgaggcgaaccgaatagcctcctgcaagctgctggcacggatgtcaccgaccggggaggcgcctgcgtcagtcaagaaaagaacggggatggaaggctgcttgaaagagagcagcagacagatgtccgggttgaagctggagaacagtatgtcgcggccgcctcctaggtcatacaccttggtcaagatggtgtcgacgaaggagttcagttccactgcgtatgtgtccatttcttcctcctcgctctcgtggagcatggggtattctgacgaccttggttagatcgacggaatagctgttcttgggaagctttagtaactcacttagttcaatattaaatccgacaggtttcgggatcttcctgaataattcctccagtgtggcgaatggtgcctgaatgtgctcgccgcgggtgttgcccttgaatcccttcttcttgaagtcgcgtgtgtgcttgatcttttcggtcaattcggccgggttgtactcggagccaccgaccgacattgagcgctggcgcgggccaagctcagattcctcgccgttagttttgacagatcccggcaatgaatgacggtaacgtccgatgcctaactcgaggaattgatcaagtgtcatggtatgaacaggcgcatctatacctgtctcgctgaccaggaagtcgtggtagatgacaggcacatggtctttcgtgagctgtacatcgaactcgacatatgaggcgcccaggttggctgcagcgatgaacgactccacagtattctcgcccaactgtaacgaattgcggccagccatattcttacctagtccacggtgtccaatgaccatggtggagctcatcgagcgccagtaggtctggttgcccgcgatagacattttcgggtgcttgaagggcgtgatgataaggaagttgaacgtcacagacccgatcacctcaagggtattcgcggcaacaatgggaacagtggaatcacctttgaggttgattcggtgcgacccgacagtgggcttgatgctagaaagcagagcgacaccccggccaacaatcttatccttcgatcctgcgtaggtggggatgaggtcgaaaagcagacgcaccttgctaggatcggtagtgtggaagacaattggctcggttgagatattgtcctgcacaggcaagtcaatcacctccggctcaccatgtgcaccgctagctgttatcaccatcgacaaagacgtatctagctgggtggcatgtgcattctccatcggaatgcggtcgaggctgactgtctcaagcggcttgcgcatgtccatagttcccagactgaccaagatcatgctctcatcggtgagatacctgtgtccaaaagtcttgataggttcagtggaccgtacgccaggacctccagaagttgggccaggcgcatttgaccggcgatcagtgagggacgactgagtcgggggcgaggaggaatcggaaccagtgaggtttggagtagacgatgaaaaatcaggctcagtggcaggagggccagggctaacttctgccaagcatcgggcgatgtcaagatggcctctgagggccgcgtgctccttagccgtccagccagaggagtcgaaacgctccacatctgcaccagcggaaaccagcattttggccacactcagagatccgtccacacaggcaatgaagagcggagtccaactatatgtgttttcagctagttctgtgtctgccttctggtcgtcgctaccatccagcagaatttgggcgcactcgtcacggccaaatcgggcggcaacgtgcaatgcagtttctccctgttcatcctggtaattgatatcgacaccagcatccaccagaagctggacaatgtcaatgaagttggccttggtcgctaataccaatactgcactagacttcgagacctgttttcttatgatgctccgcccctgcgagggaccatgctgtttttcggcatccaagagacaccgggtggttttggggtggccacccacaacactcaaatgaagcggggcccagccgtcattgtcctgccagagaggaccgtcgatcccatcgctgacatcgaacatgtcccattctttgagatgctcaatgatcacttcacaaacgaccttgaaaccatactgtgccgcatagtgcaatggagtgcgtccagcaaggtctttggccatcaaagactcacgctgatcagggcgcagcgagtctaagagaaattggaagtgaataacagcagaatcctcgcgacccagctgctggggcatgtgctcctctttgaccacggggcgcggcggttggagggtcggaggtgccgcgggtgtgatatagcgggtagtctccggagggaagttgagcaccattgacgccgcgggctcggcgtcagtcgtaggctggtcacgaccaatggaaatgaccagacggtgaaggcagttacgtctgttgatgtcatcgtcctcttctagggtgtccacccggttcaggagaagattcaggacagcacgagaacgatgaaggatagagcgctggatcagggttctgagaaccctaggataaaccgtgtctcccgcttcatctgcagtggccttcaaagtctcgagtagttcaaggaagacatgagtgtcatccttgcgcagggcatcatccacagcagtgagaatgctcgtaggcagattaagataaggcctagttgggccacgcttcaatgaaagggaagaatgggtggagctcgtgtcatcggatgccttgtcgtccgccttggactggtccgtaatgatggccatccaagcattgatgcgatcctgagactggaagacgcgctcattggaggcgaacggggcgggatcgaccttcgtctccagatagcgcttctgggcctgcgcaccaaccttcttgtccaacttcttggtgatcttgacgaagccacgtcgattgacttcaccataccattgtaagcggcgcaagtggtatcgcaggtccagcagggcctcgcgcaggtcatgccgatcctcgggctcgagagcatggcgaccatccattgagtagccatagcgctcctcgagcaacttcagacggcgggcgaagtcggaatatttcttgttgtagaaatgatcgacatcttcaacatttcggtcgaggttgtagaagaaacctataggcagcaacacaaacggcctggtcagaacagcgctcaaatgttcaagataataaattcaaggaaatgaagcattaaacttaccagccaaatccggctcctgtcccgatttgatctgctcagcagcagacttgatcagcttcttcagggccttgtacttgatgtaagagccgctccactcgggaaccgtgaactgcggcaaattgcggccgaatttcatactggcgagactaaaaagtccactagaaattcagttcagaaccacactcctttcaaatccacgctttatctgcaatttcgagttgtgtttgggctttccaatcgaagaaaattcggagtaagttcaacctgaatatcacgaggaagcgatcaggtgagcgggcgaacgcaggcaatggaagagatgaaccgcgccatcggaatgtgtgtgacagggaatatggagagggaatgtaaaaaggaaggtagaacgacaaagagacaaagctccaaagtgtacctgactgtacaaactgtacctgtctgggagtgtcggggagatgggagggatactttgcacacctagagaaagacgccgaggataaatcgagaggagaagaaccaaagagctcagaagttgagaaaagaaccttggaagagtccaggtgttctttaaagcttaggaaggcgaaccggttggaggtgtgcgcgctggactgaagatgatttgtcgatccacggggaaattctccacggtacggtcttataaatctccgccaagctacatcatatatcaaggtaccgaacactccgtactatatatacacagggacggagtacccatgtatgtattggatttgcggtgtggaatttcgtccgcaagctcacgaatatagtggattacttgtccaacgtcatacgaatgggagagaaaggataccacttgaccccccacatgcatgggatcggcgtcagttagtcattggccgatggaccctagattccctcgtatagaggtgttttgtgactttcgagagagggatcaagcatcatgtatcaacaaatacctggaatgcatataggaatgccgatgagagttcctaaaagcttgaatggctgaaagttcaaaggacccatacagggggagacccgtcacgaggtccgctacagaactacagaagcgccacagcctagttgggaattatctcgatagtcagctgttcaaatcagaggttagggggtaagatcaagccattcataattctatgagtgcaacctattgcactctgtgcgccgaattccatagattggacgcctcccttaggcgtcctaagaaaaaagcagtcgccaaatccgtcgctgtgctcatgatcaggggtcatctcagaaactcattaaaaagcatgaaatataagaggaaaatcgcaaaaactccactggatcagccagcccatcccaaagccacatgcgaatggaaaaaagtgaaaaaggaatctgctcgaaaacggaagacatcgaacggccatggccgctattcaatcagcggcttcaaggcctctaccccagcctgtagcaccgcttggttcttcgtcttcttgagacatgcagtgaggacatcaattcctcctgcggcgcgaacggcagctttagcccgggctccgatatcacctgtcgcaatgcaagtgaggttgcgtatgcagaccacacctcggtgagccaaggcatcgtcatcctcctggcacaatcccaataacagttcaactccccggggtcgatccaggacagctgctatggcggcatcgaactccgtcaacatcgcaagagccccgccggcagcccgtcgcgtcggagcgtcatcggcatcggtcagagccaacagaatgtgaaggcgttgggccgcttgcttggagccatctgcaaacttgataatgccagactcgcaagtcatcagattgcagaccagttcgcaagaagctcgctgaacttgagcattgctagacaaaagaagatcttccaccgcagaccagccttcccgtaccatgagttcgggtgcggagtcgtcatgcgggtacgaagcgagattcgtcaaagctaggagactctcaaatactgggagtagatcacgaggttggtcggccgagaacgaggcagtctcgggcgaagagaggagagagagcaggggacggacggcggatgtgacctggggaaatccagatgctgggaatacatgtgaaggatcaacagagatgaggatccgggccagcgcgtgtgatgcgatgcgtgttgtttcgttcctcacagggccagagctactctgcttcggggctgcaagggcgagtaacagcttcaccgcgccttgctgggccaatgttccacgggacttttggggtcttgtcaaggactgtagaatctttgccgtgagctcattggtggaagggtaggagactcggccgcactcaacgagcagagtcatgatgcctgcatcgataacggcggaacatcgcgacaggacagcttcctcttcatctcgaatatctatcgctggtgccttcacggtagaagggtctgcgtagttcttcaactgtgccatcttcttttgctcttcggataggttgggtaagaatttggtgagattcaaaacgactgtcaagccaccatagagcacggatgagtctttggtgttttgtttcatagccgcaatgaagttacgtaggaaaaccggatcattggcaagttgatccttgacggacggcttcaccgaggtataagccaatccttcgattgcgtgggagctgtgttcaaccttttgttcagacatcagtcccatgaatcgatgaaccagttcagactcgctgtcttgttccaagaccttaccgttgccagccgagggtttatcgggctcggatgcccgaatctttgccagggccactgcggctaattccgagcaattatcacttccattggtcaacatatgtgacaaccattctccaaatttctttgaaacaacctcgcggcacggacgattaatgcaagccgcattgagaagttccaacacgagagcttctaccttcttgcttttggtgtctcgcgatgcgattgggaggaggaagttcatgaattcgtccgacaagaagagattggcagctgcagagggagccacagggaagatggcggccaccgcagagaaagcaacgatgagatcgctgacacggcccttgccaagaatggacatgatcagtgtcaaaagcttcttctcgcctctttccttggcgacatcgagatattttgcagtagccagggtcgcctggcttcggacttctagcggcagccgattgtccagggatgagaggatcacctccaagccttcatcgtcgatcaaatgttctagttcaacggcgtggacagcgagtaaccgagtaattccctttaaagagcggccatcaagatcatggcccgattccatcaacttggcaatgaaaagctggaagagttcactctcgcagtgggatcgtgtttcctccgatgtccacacggtgggatccaacactactgtatcaagacacaccgctgctctatcaccccgatcatatatctcgtcgaagaatgctgtgacagaggtctggagctgtgtagaaaagtacaggcgaacactgacgttctgtcgtaccagcccagagatgatctcatcctgtgtcgtcgacagagattgcgggcgctgtgcgagcaacaacttcaggcattccaaagcgacgttttccggggatttcaggccgtcagtccggagataagtagcagcttctttgcccgcgctttcatcattgtgtaaggtatatcggcggcaaagatcgagaagttggtgaccgtctttgtcttcatgctgaactttcagaaaggcggctttcacttgaggattttcgggggcgatcgcaagagcttctctaagatttcgggaagcagcctattggagctgcatatcagtattccgctagcttccattgagaggtgttcaagaaatagatcacctacctctcggtggcccgcgtcgaccagttcgacagcctctcgggccaggtttacagcgcgctcttcgccctttgcttgaaccattgcaggggtgcgcaagagaaggggccaaaaatgaagattccagttgtcggatcgagctaggagggttaaagtggatgggagggcctttttttttcctgggtgaggggagtgcggagcggagagaaatagcgataaggtgggaaacagacaaccgctttttatggggaaggggggaaaaggaggtcttggaagaagaaaagcgtcgaaatattagaattttatttttgtttcggtttgccgcgctggcctgttcgaattcctaaaatgacaccatagacctttccccgtacatcgatgtactccgtaataatataccgaatcttacagttccgcgcccttttccttcacgaatccccattatcaattggtccgataagacaccaaccacagcgacgaaccccgtcacgttgtcgataagcaaatactcagcttagtccttttcgtcttttggtgtgacctcgcaagtcaacattccaaggtctccgaagagatatcctgtggcctccggtgtgcgggaacccatttttatacaactgccgtgaacagtagaaaggcatcttggaacccagatatgtacatcacaggcactagtttcatcttggcgcattcaagggatatatgccaagagaaaccatatcctttctttcaaatcggctgaaaacagagcatctttcaaccaaagttgctcagacattcaaggtaatttcagtcacccacggcttcgcggtgtgggattcaatccgattggagtgttggttctcccgagatcggtctgcctgtgagtcagtcgaagatcccgcagagtcaatttagtatgaggatgtaaaaggatgcaattcaacgacgtaggttggagatatatattggaaacagatataggacagctatagttgttgttatcaccccgtgaccagcttatcgcttcaagatcctcgacaggtacctagagcttggacttcaaagttaattccggctgtatgtgcagcacagggttctaaataaccagcctggcatcaatctgtgagcccagctcacaataatgaacaccaccttggaccgatcctccatttcaatacaatgaattccgtggatgcttcggagcattatgagttaggagctaccggtccgtattctctacacttacaagaggcgaacaactggctaaccatatcgacatccagacctctccccatccctgctcaccatagtcatcgacacaaacccacacgcctgggccgcactggaagactccctgccactctctaaagcaatcgccaacatcttagtcttcatcaacgcccacctagcatgcaactatgccaacgaagtcgccgtagtcgcatcgcacagtcaaaaagcagcatggctctacccatcccacgatgatccccgaaagcgcaccgccgatcgcgacggcgacgtcgtaatgaacggcgcaagcgacaccccagccccagaaacgaacaaataccgccccttccgcatcgtcgaagaacaagtcacccgcaatctcaaagaactaatggactcgacgactggcgacgatctacgcggcaacatgtccacgatgctagcgggcgcgctcaccctcgccctgagccacaccaaccgacgcacactcgcctgggcggaggagcacggcggcgccaacgccgaagatgcagcggccgatggcaacggcgggggcgggggcacatccacaaaccggtactcagcctcgaacgaggacgagcggctgcagagccgcatcttggttgtttctgtgagcgggtctaccgatgcggcccaccagtatatccctgtcatgaacagcatctttgcctgccagcgcttgagcatccccatcgatgtgtgcaagctcagtggcgatgcggtcttccttcagcaggcgtctgatgctaccaagggagtttatatggctctcgccgagccgcgaggcctgctgcagtatctgatgatggcgtttttgcctgatcagcgctcacgtcgtcatttggttcttccgactcgggtggatgtcgattttcgtgctgcttgcttttgtcatcgccgagtagttgatgttggcttcgtctgctccatttgtctcagtatcttctgcgagccgccccctggtggtgactgcatgacttgtggcacgcatctggatatcggagacaatgccaagcctgctctgttgccacggaaaaagaagaaaaagaagcgtgttaacggggcatccggaacgggaacgcccatgtcgacgcctacgccgggtccttgatatcttttctacgggaggtcatatcgttagagaaaaaaaaagataaccagatggtgacatctggctttatgatgtctgggttggtattactcctggatcacacattcgcttgatgctatgagcaacactacacgtagctggttcacaaggaagagatttgggacaattctcatcatactagtgtgaaacgaataggtacacacggggaggacagccgggaattttgaaacactctgatcacattgttggtgtcctatcttaaagaaggaggctatctagggagagcaagaaatatccgatgaagcaatcgctcgtcttgtcatcctgtcaccgtggaagacatcaatggtgtaaggccaaggaaaacaatggagaatcgggtataccaaggcagagatttcagatgggagagactggactgaggcagatacaggtgattgtgggcgaaagctacctcgtccatcgatgagtaccaacagaccataagtcagcagagcaaagaggcttcgctgcaagatagttgtagttcgcatccagagtgaattgcaattcttattacatatccttgtcagcatccacagcttatatcttcaacctaataatgaaacttacagttatttgcaaacctgattcgacaacctccctgggcaatggttcctcgcgagcctcgcgacatcagacaagaaggtctgttcgaattgctagacatcgaggcaatggcctgaaagatatgtttagcatccagtcctgcaccatggtaataatgaataatgaaagactcacaaaagagtcggtgttgtgggcaaagtagagttcgatgcccgaattgtttttcttcacaacgaccaccccaagggctccaaagaggacgctgttgctcacggcagggtgttctaacagacaagcaaacaaatgttagtgtttggagaattaaagcagcgaaaagaagaaaacggaccgttaaactcccttttcatccatgccctgatagcttcttcctccatcacctgggtaaaaaggtcattgtcgcccatcttctgactgtaatacatcctttgcgcacaagtgcttgccgccagtgttgaggcaataagctctccagtcccagatgtaacaactgcacatgtagttccatccacatcagatgggtcttgtggaataacatgggtgccaatgccaattagggctgcaggaccaattcgacctcggtgcttcatgccaatgccaccagaagaagatcccgctgcaatgtttccatacttatcaatggcaatcgcgccaacagtgtctgtaatcgtatcctcgtcttgttcactatcggcggcatcggggctaccatcccgagataagaatgagggggagacaggttgcacaggtagctgtgagttcgcgagcttggcctttttctgacttttatgctccagcgatgctcccgggcgccccttcacatccgcaaaaaagcttggatcggcctggtttctgatttcttcgtctgctgcatggctggtcggatgagctcctgcttgagaagcacgctcgagacgttcaaggcgagtgtcaaggggagtcatgggccggcgaatccagggatcgatcatttcgccacgggtttcattttcataatcattgacttctgcggcccatacctgataacgctctagagcgacgggcgagatcaaggcttcatcgggcatgatcaccatgccatgttcccatgcaaagtccttggcaccttctccaaccaagaagttagggggcacccttgacatgcccagctgtacattagacttatcataaatcttccgagcaagcatgattggattcctgatgtctagcaggctcacgtgttaggcaagactttctgagcaagagacacaacaaacttactgggcacagctccaaccgctccatttagcccatgatgatcgacaattgaggcatcgccttcaacaaccccctttgcgttcaagttgcttccaaaccctgcatttgtaatcgggttatcttcaagcaccattatggctgcttcgacggcgtcaatggcggtgccaccactctttaagaatgccatagccttgagcgcggcgctaattcaattcacttattagactgtgtaaccatcaaataaaagaccgagactgacacttcacaggctttcaaatgcttgtgctcattctcgtggctgtggaagcccgccccagcatgaataaatatggcacaaacgccctcattcccggaggtttgcgacatcttgaaatggtcaacaagtgcaatttagggatcttccacgagattgtgcgcgatcgatcgaggtatcaggtcgaggtcaagagaagcgttgccgattaggcccgaatatccaaggcgataccttgaatcgggtatgtcgagaataccaagtttgccacgacgtcaagctaaagtgaagatatggatgaggcgcgcgaactggcaaaatcttggacgcgtctgcagtgtactcgcagattgttggatcgaaatgcaggtgctctttgtgagatcctcacttcaaattgaaacgactgaccgcctagttccagcctaaagaatcactgggaactaatgctgtaacgatatagtagactttgggcacggggagtgaagcgagagaagacaagagtctacggcgagaccatccgtgtcaaggtaagagaagaatacagataacgaagggcagcactatgcgtgccgtgcatcagaaatgataatcttggagtaataaaagactgaggggcaagagaggcttagggattgatgatgtgcgaatgaatagttagagaatattgcagatttagggaaactctcatagcactggtcgctcttgccattttggtctaatttcactttttgctgaaagtaagcagtacaattgccgtcaccagggcgacatacaatggatggttgtctgctttcttatgtacaaagtaggaaagacctgaggatattttgatacttcccggcacatgatgttgacgtgtgaccgacccccttaggtaatctgacctccgggcactgcatctccccccgccttgtctgcctgtcctcttggtctcttgaagtcagggcattttcggctaccaattgagatccagccgattctctcattattgtctcactctatacatcgcctacacttctttcaacccctcactgtattgtgatcgttcctaggcccaaccacccgccatggcgtcccaaacaccagccgttgtcatggacaagtaagttcacatctgcaagggtcaaagtaatatttcactgcttactctatacattttctagtggaactggctattctaagcttggtatgtttttctatggtggttaaagagctcgcgatcacggattaggctgacatgctacctccaatattccaggtttcgccggtaacgactccccgtcatttgtatttccgactgcaattgcaaccaaggctggtgctggaagtactggtagctctgggggcggccgacccccagtcgcaaacaagccctcgttcctaggcgctggcagtgggagctccaacctgtctgcaaagcgtggcacggaggacctggatttctttattggcgatgaagcgctggctgcgggcaatggtccaggatatgccgttaactacccgatccggcacggacagattgagaactgggaccacatggaacgattctggtcgaactcaatcttcaaatatctgcgcgtggagcccgaggaccactacttcctactcaccgaacctgtaaggcgactttatatgatagcagcgtgctgtgtttaaaattgtgaaacccctgacatttttggattatagcctctgaaccctcccgagaaccgcgagaacaccgccgaaatcatgttcgagtcgttcaactgcgccggtctttacattgctgtacaagcagtgctcgcccttgctgcctcatggacatcctcaaaggtgacggaccgatccctgactggaacggtcattgactcgggtgacggtgttacccacgttatccctgtcgccgagggctacgtcatcggatcctctatcaagagtatcccgattgccggacgagacatcacatatttcgtgcagagcttgttgcgtgaccgtggagagcccgatagcagcttaaagacagcagagaaagtgaaggaggagtactgttacgtcagccccgatattgtcaaggagttcgcacgttatgaccgcgagccagatcgcttcctgaagcacaccgtcactgcgccgaacgggcggagtgtaagtatcgacattggatacgaacgtttcctcgccccggagatcttcttcaaccccgaaatctactcgtccgacttcctcaccccgcttcccaatgttgttgacggcgtcatccagtcctcccccattgacgtccggagaggtctctataagaacattgtgctgtctggtggttctactctgtacaaagactttggccgtcgtctacagcgtgacattcgtcacttggtggatgcacgaatccgtgcctccgaggctcgcagcggtggcgcacggagtggtggtctcgatgttgccgttgtcactcacaagcgccagcgccatggtccctggttcgggggtagtctgctgggccagacgcctgagttccggagctactgccacactaaggcggagtatgacgagattggtcctagcattgtgcggcggtttgcgctgcttggtggcccgggaagctcgtaaggggaaaatgagtgaaccttatcattagatacttgtcaatcgatgtagctcagccttttgttcatagttcgttgtcttatctttcttcggtggtgctgctctctgttttctttttacccaaaacgggttgcgggtgttagcggcattctctacagtgcacaaagccgatttataacgtagagcatataggcagtctgtagcctgaatatcttgaaattttttcaaaaccgaaaatgtattagacagcgtacatatccactagcgccatcatgcttttttggacttccttcccaaacgccacgaggtatgcaatgtcagataaatgtacagcctgaaaaggctcaatattattacttttctggggttttttcactcaaacggcctcagcctgaggaaaagaggtgcggttcaaaatagccacaccctccacgtgaccggtctgagggaagaaatcaaagccacggacgctctcaatctcatagcgaacattctgcttctcatcaccctgaaccataacagcaacgtcacgagcctgggtatggacgttacagctgacatagacaacacgacgcggcttgaaatcaagcatctgacgcaagaagtcttctgaacaacccttgcgaggtgggtcaataaccagcaaggtctgatctggtgggtacggaacttccttgaagagagtggcggcgtcggcagcggcgaagcctgtgttgggaagattgtttgcacgagcattctcgcgtgctgaaacgatggaatcgcctccgatgtcgacaccgagactggacttaaacaaaggggagagggtgattgtgaacaggcctgagccggaatatgcgtccaagaggtacttgattggttttgcgtcttggtcgttgcctgcaggaatggcttgagagcggatgtactctgtgaagccggacaagattgagttgttgttttggaaaaaggcacctgccttgttgctaaagatgtagtcgtcgacgtactcgaaagacgtcgcgttgttgtctgtgatgcaacgcttttcttcaatgtagttttcgcgctcaatgcggatcacatcgcccgtgtctgcgttgggagtagcggcaatcccgccgacattgggagtctctccatcggcggtaggcgcggcgtctttgggaattcgtgcggtagactcccgcatcaggagagtggcacctcgtttataagaacggatgttctccgcaactcgtttcctctcactagtgagtccgcgacgcacaatgtctgtgcccaggggacagtcttcgatgtccatatcgagtcgtcggttcttgtatgtgaatccaattggggggacctgcggttgtgagggttcttcgccatcctgcttagaacctttgcctgcaccaccatgtgcgaaatgaggggtgagttttgttcgatatccaaattgcattggcgaagcaaaggtttctccaatggtaggaataagctccgggatcaacccagagaaattggcataggctttctccacaatgcgccgtttgtgagcaagctggtcctcgtaggacatcatctgaagttggcacccagaacactccccgaagtacttgcatccaatcagcgcatcgtttctttgaggacctggttcgatcactttaacaaaatcggtcaagctgtacgacaatgactcgaaatgtttgaccaatttgacccgtacggtgtctccggggaccgtgaacggaacaacatagacatatttcccattctcggcgagcgctagaccatcacctgttgaggaaagctcagaaatcttgacatcaatctcggtgaacttctctggaagggagaaaggcacgctgtcgccgttggtttcagcctgctcagtttcgttccgtttgaggagttggtttatatcgcaaagcaggacctcatcatgtccactgctcttgttgttcttgtcgaccttcgccttcttgcgcttgccgtcaaagtgtttcttgggaccgttctgcattattgcggggactggcgcattcgttgaacggcgttgacggtataatttggatgctggccgcgcttgaagggctataagggtctgagaagacagagaagaagtgaagcgccgaacagatgaccgtattgcaaacatgtaaggtgaaaagcgacagcacaataatttctagaacgaaaatcatcaaatgagaaatttattagaaacgcatctaacgcgtcgttgattggtcagacactgaccgcccgcaagaaagaacttcattccgacgcttcacctccggctggcctcttttgcctttgcgtcctccaattgcctccgcatttcgcccttttcttcatttttaaagctcttaactggcctaccgctggctggtgagctcacagcaacgccaccatgaacattacacggccggcacgatgccttttatgcagcttcacccgtgctgccgccccaggcacgcgagtccctcgacgccaattccatcctactcccgcgtctctctccaaccggaaacccaagttcccaaatgttaaggctccccgggtggaggaaatcaagccttacacggaagagcagaaggctaagcttgccaaggagtactcggaggcacagatggctgctatcgaagccggcgaagccgctatcgacccgaaggatctggcagaacagatggacgaacgcagtgatcccatggcatttaaatacgtcgacgacttctctgttattgagccaggcattgatcgacaccagcgctccccacagtcgaactcggattacaatttcacgctgaaaaccgaggacgatttcgtgaaggacttcggtcagttctttgccgagatgcctgataacacgacaggtgcagacttcgttcggttcgcagaaaacctgcgcctcacccacggcaaggaggagagcgagctgtctccgcacagcgcacttgttccggatctcttcggacctggagagaccattgatgagccccgcgtggaagagcggaagacagctgccgagaagggtgagaaggagcggtcagcggcggctgaagaaatgacagacgccctcaagagcctgctcctagctacgggctacacggagagccaggtcaagggcctccgcaccaagacccttgtttcacacagcgtcaccaaccagacccgactaggaaaggtccgccgtgcataccgtctttccattgctggtaacggaaatggtttgctaggtatcggtgaggccaagtccgatgaagcctccgatgcaaagatccagtcgcaataccgtgcgatccgaaacatgcagcccattccccgctacgagaaccgaacaatctatggcgatgttaagggcaaggtgggagccacagagttgcagctgatgcaccgtccacccggtatgcctagtttcattccctcggacattttcatttttgctaacaataataggcttcggactccgtgttcaatatctcatctacgagatgtgtcgcgctgccggtattcatgatctctccgcccgagttggtcgctcaagaaaccagatgaacacagtcaaggccgcctaccaggcgttcatgagccagcgtaacccggagcagattgctcacgcactcggcagaaagattgtcgatgtgcgcaaggtgtactacgcagggaagatttagagccgctcatggccttgactagctgcttcgtctcagcgtgtatataatgcttctcttttccttcctcttcttcttgtgtcttttgcatgtacttctataagttggttgttaaacatgacgggtcatcaattctcggtaatcatgagctattcacagcatatctggaaaatcacatatcacaaggttccttagcataacaccatctgattcgcgccagaacaaaaatctagaaacaacaccccgggtataatacgcgagtaaacaaaaaaaaaaaccatcaaatgcaacaggcaattcccatgccttcctttcttattggaacgtcatgtctccctctccctcatatcctccatgctggtactcctggtcctggaaacgtcgatcctcgttttgctgttgttgctgttgctcttcattctcattccagatctgctgctgcaagacaatgctatacacactggccttgagcaaagtgcatacagtcgcagtcttgcgctcaaggagacgaagaccgtcgagaggcatagaggcgggggagccggcgaggtcggcgagtttatcggagagctgcgcgcgaggcatttatcagtaaccagtataaccagtatttgtagttgatatcatttccaatcgaatattgttcatattcatttcctgtgcagagattgtcccagaaagataatcaaggcgaacaaggtcttctccacgtacctggttgacattccgcagcaatcgagcgtattcctccagcacttcctgctccagatctgaaacgagcggattgttacccaagagagggttattcgagtggccccggctgtgcgaggcgtctgcgtcgttcattgattggggtattggaggggtggaggtttccgcggggtcgacctcggcgtacgagtaatcgttgtctgaatcttcgggcgcaaaggcagacattatggaggatggggttggttgctgtttattgaatgttgtagatgttgagctgcgaagtctgcgaaggctgtggtgtcatgtttcgtgttttctggggttccgctgagacgcgttccccaagcttccgctgagatccgaaatctactggggtgggttttatggccttaaacttatttcaacgtcagtcaataggttaatattatgtgttcgaggttatagccatctctgtatagcctcattttcaaaaattcgcccaaacacacatctgatgcctatttcaataacacaggtgtcattaaagacacatggctataaatacatattgaaaccatcaaggaccgtctcattttatactgttgtatattatgaatacttcgtgggcttttcctttttctattaggggtaaaaatatgtcttgactgatagtacacaactctgtctcagttccttggtgctgttcataacctggctgggaggcgcaatcgcgagtcgatttcttttttttacggaaatggcctgtattagaagtttgttttatgggactattgaaagtcccagaaatggagtaactagatacatggacgtaggcagagtctctagattttactacatgtataaggcagcatacttccatttgcattgaacaaattcgtatccgtatggaatactctgtggagaacactcattttgcatacaatatgaatataaatctagctgccttgtcagcgagccaaccatattatcctcattgttggacaaaccgcgtgtccttatttggttgtatccacgaagcactagcgttggtctcccagccgcggcagcctctccgcgcgttctaccaaggcgaataatgtctcagtgaaaattcagctctcgggggaagagattactttgagcaattactacaagccgaccgcaaactactgtaacggccaatcttttagtgcgctatttcatcaccttcccaatcaaagagagagagacccctataattccatgtatatcaatggatgcccagaggtggagagatccactggagggaaaaatcacattcagcaactgtagtcgttgataagtgactagtaactagtaatctagaagcatccaagaagctcatcgaacgattaggttttctttaaacacggttaccgtgttgcatcatagcggtgcgtagtacttcgtacatattttggtggcctgagattgtcgattccagtgtggcactggccgggattgtattggttgtagatatccacatctcaacgacttggctgcaggattccaaggactgaatcagacgaggatgaagtagacgggagtccgtcgcagttcctttttccctatcaacgatgaaaagaggggactgatctttgattggcagagcattcctacaggctaatcgaattagtcggaagaagcttgggaggctaatgtcgcaattcggccctagcgatccattgtcgactaggatgcgaggaatcgacaggggcgaagtactcggctgaattaagttagtttatatttctgcctcaggtgagctttttaattcgatactttcgagatgatttccctatttggtcaacttagtcatggttgactgcgaaaattacagatccttcttagacagggttattatatgtgaatacgaaaacatgggaaaatgtaaagttcgaaataatatgtcttatttctatcacagaaatccccatttagaagtggatattcactatcgcaagcgcctcgtggtgggtgttggtctcctattctgtacggagtactccgtacaatgtagcaccatagacgcttttaggacaggttcccctgaaaaagccaacgccaagatattaatgggtgcggagtagaaggcgatacagtctagaagacatcttgccccgcgaaatacgcaggtcttttaccgcagcgtcgaaggaatacgcctctactttatttaaatgggagcctagtcctatatatatagtgtctgatgtgacatcgtcgcctccagtgaccgagtttaaaatgccgattcgactaatatggccttgtgcgagtttgccgcccctaacaaacggattgactctagtgtaggaaaggagccttggctttgcgctttccacattaacatcttgtccctctagaatcgtcttggccgttacctcatattgtggatcatgacaacacggcccataatggaaaggacacaatgcaagtcaagtggccacttcgcccttacgtggaagaaaaaacgacacggaatacgtaagtgtccttaggtaggaagttgatattagccagtcaccccagatgcggggctcgagcggaaatagaggggcagggctcttttcgtgtcgacagttcacagacgtttcatttctaaacttatgggatctggtccctggatcccaaagaataatagagttgcccaagagatgttttcctagggttcggggtagacacgtgtcaaggttttttgccaaatacggttagagggatttctactcttagccaaccttggaaggttcggtagccaagatagccaaggtaggttagccagatttatatctcattgcgaatacgaatggccactttcgaataccattgtctttaagtttctcaggggaaaaacccatcggattcattattagggggaatggagaatgttctctgtggattcctagtgctatagtgtatgtaatatttagaaatgttccatatgtagtggagtcgagcctttacatgggatagggggatctaaagatctaacgtttcaatttccgacaggggcatctcaaggtttaagcttgttttagctcggcttgtcaaacgggacatacaaagtatggtatagttgacgagatacgcgtatggaccatatttcatcttcgccacagtgcccactgccctgtcacactgcttcatccaattgtgacacgttactcaccccgacctccgctgtccattccccatggagttctcccgtgcccacatctcggttggacagcccaatttacactgccccctttgtctctgtctcctgggtcgagaggaacgggacgtcttagcgctacggcgctatgcaagtctaggtaacccaatagattaatgcattcatcgcgcgaataaaaaagcaaaatgatatgtccccgagattgatttattataatcgtcttcacgccacatccttcttccatgtacaaccttctgacctaaacaactatcggtcatatctcatcggattcttatcaaatgagtgagatgtccacctcagctcgggctagggacaatgtcttctcaagacgtgagatcgagggcatgcttgctgaaggaaagttgattatcattgtcgacggcaatgttctccgactagattcctggattaaatatcaccctggaggtgatatggctatcaaacatatgattggcaaagatgccacggacgaagtgaatgcgtgagtctctctaacacctctctattcttgtccaattcaatttgcgcattattctaatagccttcttaaagtctccattcacaggaagcccgtcagcgcatgagcaaattccaaatcggccgaatcgagggccgctggaccaacttcttgcctcccatccaaggtggcgagttccgcccattaaccgaaaatgagatcgacgaagaagacctgactctctcagagctatcaagcgaagagagttcagcaccaccatctcctatcttcgaagccgaagacgaaaaattgggcctaagacgcaggctctcagtatcaacaatctcctctgcaatcagcgctgtctctccgtcagaagaaaccaaaccacgagcctacgtgatcgatgctcgaactcaagaggagattgagctggatgcatctaaatacccgcctcttgacgcagaacaccaagaatatatcacaatgagataccgcgagttgcaccagcgtatccgcgcagcagggctgtacaactgtaactacacagcctacgctatcgagatctctcgctacaccctcttctttgggctgtttgtatttttcctcaaacattcctggtactgcctgtctgccttcttcctcggctgtttctggcaccaacttgtcttctccgctcatgatgccggccacatgggcatcacgcataactatcagattgataccaccatcggcatgattatcgccgattacctaggcggcctaagcttaggctggtggaagcgcagccacaacgtccaccacatcgtaaccaacgctcccgagcacgatcccgatattgaactgatgcctttcttcgcgctatcgcaccgcttcttcagctcgctccgcagcacctactacgaccgcatcatggaatacgatgcagtggccagggtcaccgtcaaataccagcactatctgtactaccccatccttctcttcggccgtttcaacctctacttcctcagctgggagcacatcatcgtcggccgcgggccgaaacacggcgcaggctggtggcaccgctggtttgagttcgccggccacatcttcttctggatttggttcgggtatggcgttgtctggtgtagcattccgacttggttcaaccgcgtcgtgttcgttctgatctcgcatatggtgacttcgccgctgcatgtacagattacgctgtcgcactacgccatgtccactgctgatcttggcccgctggaatctttcccccagaagatgctccgtactactatggacgtcgactgcccaccttggttggactttttccatggcggtctccagttccaggccattcaccatttgtatcctcgtatcccgcgacacaatcttcgcaagacgcagcagttcgttcgggaattctgtgaagatgtgaacattccgtatgcggtctttaccttctatgatggcaataaggaggttatcggtcgtctcgctcacgtggccagacaggcaaaactcctggaagagtgccggaaggcttatgcggcagatccccatttgcattgaagatgttcgctctaatagagttgagcttttgagatacccattatgtagtttgtattgttttgcaaattgaaatcgcttggaattgtgatacacccttttttctcctatcaatatttctgctttgaattctcgctttattgtgatctatcttatggagacttgatttccgtctgtcagtattatacctgtgtttgacattgctggccatctacatggtgtaaatgataggcgcacctacttggcagagacaatttaatgacataagaggatcattaagtatattgaaacaaaagccaaatgatgaaatcgcttcgagtttcgtatacatagcttgacagcagaggttatcttgaaaacgtaaatttgagattgaaaacagcacggttaacccgaaaaagcaaatccgtaacgccgtccgctgcgaaataggatgaaagagcaaatatataaaacagttttcaggaagacgcgcaaagaaaacaataccaacagctcagagatcgtgacacaaaccatgaagtcagcgaacggttcgtgtcgatgctatgttgtgcctgaattgaaggcaaccaagagtaatccaaggctctaggatgtgaagaaaaatgcaatatgcaaagcaactggcaagcaataaggcataatgacaatgtgatgaaaggaaaaaaaggggagaaaaaaaagcttgaatagatccaccaagaaaaagtcccgaaacactccatacacccagcaaggattgcaatggaagaagaatagcagcatctaaatacagtcgttaatgcatcatggtcgtctgcgagccgacacacatacggctgtttccctcgtgtatcggataaaagaaaacaagtgataagacgtgaagagcacaggctttacatatcaccctcgtggtgaagggtgacactgttgaactcctcgaagggatcgttgagttcgccgttcggagttgcgaggcctgaatccattgggacgcccttcatcctggtagaatcggtgccgccaatatctacgctagcgctctccttgacattacggaaattcaccgtatccgtgccggcacgaccctggtgcggaatcataggcggcttcatgtgacgaataagggcccattgggtctgtcggaagaagggatgagccttgacatcagaggcaccagcgcgagctcctaggcgcttagtctcatccttgatcagcagtttgcggatcagagacttgcacatggtcgatgtcggctgcgcacccgagtgctctggaaagttcacctcgtcccgcagaatgctagcaaacgtcgcgtttcgattcttgcccttgaatggagtagtgccgtacaacatttcataaatcagaatgcccagggtccaccaatcaacggcgctggtgtgaccgcaacccttgatcacctcaggtgcaatatactcttccgtcccgacaaaagaatttgtgcggaaatcggcaatacatgacttggtatcaatcgtaggcaagccggtattggagtttccaccactgcgtgcaggaatcatcgtcggggcacccccaggtccagattgctttgacagatcgaaatcagaaagcatgatatgaccagactggtgaagaaggatattttccggttttaagtcacggtagatgaaacccatgagatggagatattccagcgcagcaataacctctgcggcgtaaaagcgagctgcatcctcggaaatacttttgccggggcgggtttgcagggctaaaaatggacaagtcagcaagggaatcaagaagatgatgatgtcgaagatgggataaaaaggtgaacacactcctgaagaactcgccgccactacagtactccatacagagatacaaataatcctctgattgaaaagagtgatatagggtgacaatgaacgggtggttgctcgtagccagaatctcttgttcggccaaagctcgtttaatcttgttccgtttgatcatctccttcttgctcaaaactagccgcaagtcagtaaatggcatcagacagtcaccggtatacaagagaaaaaagtacctttcatggcataaagacggcccgatttcttctcgcgcaccaggtaaactttgccaacatcacccttgccgatcaatttgatcttgtcaaagctagcagggccgacttctacatttcgaactttgatggagtttgaactataggtgcggcggaaagcagcgttactgttgtaatctgagctgactgaaggtatcgccagattggaatggtcgctgcctggatctgcaaagcccattgacccgcccgacttttccaccaggggctccttgccgagttgtgctgtttgaggacggccaccctgaccacttgtaaataggccttgggcattcggggcagaagccacacgtcgtaacttgcgcgctagttcctctttgtttgcagtggtcgcctgttctactgccgagacccccgtgacttgcaactcaggggtatcaggaggagaggacggaactgacccatcgttgcggtgtcgcaatgctggctgaccctggtgggcaaagtatgggttggcggacgcggtaggcgacatcgcatcatccagtggattaccttcactagccacggttgttgatcgattgcggcctatgcctggcaggaatcgagactgccggaaagcagacttctcgttcttggccgccccatgattatcccgttcgcgttcgcgttcggaacttccagaggggttgggatggggagaggagtggctacttgaactgttgatacggaaaaagttcttaatcctcgtaggcaaatgactagactcgttggagtgttttcgtgtgggaatggagagagcggggaaattcccgcgcttctcattatttgtcaccgccggcggactggaggcaaagagctgcgtcatattgggtgggtcgccgaaatcaaaatcgagaccgagatgacagtcacctaggacctaatccgaagggtggaaaagcaaggtgtgaggcggacgaaagggcggtaatcttcaagatgccaagtgccggctgggatataatcgcgcgcgggggtcaattgttagtaagaagcggtacaaccgggggtgtccacccaaagaactgaaaaggaaaaagccgcgataactgggctcatgaataagacaacatgtcagaacaaataaagaatgaagatcaagaattgagaagccagtgggaaaagagggaggcaaggaggaattggagtggagaaggacccgtggacgcggaggccaaggcttagtcatctaaaatcaattcaccagcagtgtacgtacaacgtctatctacgccagaaatgttgagaatagtcgagaaagaatgataggattactatgaaagatcaatttgaaaaaaaagcatcccaatatgacttcagcttagtccaaggggtcctgaataacccaaggaattagtactaaggaactgggtggcgacatgtcgagtataaataactacatgtatctacaatgtacatcacgtgatagttatacacttcattcctccggaagaatatcaatacataataatattgtacagattcatgtttcgatcccttcaaaatcgtttcctcccttgactcaaacttggtccatgtttcccaccctttttttttgcttttttctgccttttctgccttcatctgaaacacttcggagacttcgggacacatacataggcctgggctcaaatccgcaacgcccaacaccacggttgcttggtatcagttttgagcatgcacattgattctgctggtgtttacaatagcgggtgcggtgtgtctgacactggcattgatcaactgcgaggaatacccagacaggtaattggtgttttgctggctgtctggtgtctcgaaaccgagaacaagtgctgtgggtacttcgtctctcaaatctccgatcaatctcgatggattcatgagcgactgaccggcgttctggacattttcacgtgcatcatgccgtcgacgggcatccagactcgatgagatcatacgagacccaacgctgctgagaccacctgcaggtacatagtgcttacggcgaacactcgacctcgaaatcgccctgctcggcctacactgggacaataggctatccctgccgaatgtgttattccgagacaataggggtgcatccgacatgtcgtcggggtaatcccctccaaagctgttcattgtccgagtgaagctcccactgcggctattatttgttaaacccggctctttgcacaagcaagtgagtttggataggcttacctgtggttcatgccatgctccgattgttcggcgaagggtcctctccgttcaccgggtccttccacgtcaacgacaaacatatcgaaaaattccgtcggaatgagagacgattggtggtcaaacagctcagtacttctgtgcggccgatcaaaggaaacttctgagaggttgtcttcattcaacccctgtcctaggctagaatgtcttcttgtctgttgttcgtcatctgaaccgcccgaaattgatgcaccgcgggcctcattatggagatgctgaagcccaatcaaagttgcatcttcattgctgcagctctaggaattagtattatccaactgctagtcttgggcaaagaacttacatggtagtcgcgaggcttggtgaatgactcctatcatttccagccatgttggttagttcggcgacgtgctcctcgtggtcaatttcagtaatcgaatgcaatgccgatctgaaattggagacgtttcgaccgaagttccgaggcaaagtattgctgatacgacttctgtttccgggacgacgttctgtccatgtctcctgggggatccatgatatgattccgttgtgttccatctcagaacccatttcaggagaaagttgaatttccacgcggctgttggcgtcaaaggacgggtcattgtattttgtaggcacgttgccgcctgtcccattcgcatcatgaaacaactctgatcttctatcgacctgaatctgattgaagaatgagtcgcttctgtttctattgcggtcttcatttacatcatcatgaatccacaaatctgagcttccatcaacctgcacgttaccaaggtctgagttgttcccatttgtgtggcttgttccattgcagtttttgtctgctgctgttaagtgtttcctctggatttgtatgggatggccagtgtttgggtcaataatatcaaccccacgatttatgttggcacgctcaacctcattggtaccatcagtcgactggttatcatatgaaccaccattgatcgctcctccggtttgcacggtaataccttccggaccattggagttgttcacgctagccgcccctggatagcccatgagcatatcccattgatcaagagcgctgagaactcttgcccgttcgctgatgttgtaaacgcgcaaattataacaatcatcgctgggtggaatctgtggatttaacgcgatcacttcgttaacctcctccagaaatctttcatggttttggactttttccatcaatcgtgactttgcctcaatcatggtatcaagaccgaacgcgtatgccactcttacaaatccaacataaaagtcgcaatcaggcaaaacagcaaacggcgggcacatgtttaacatcatacgcacaattgcagcatcatcaaggttgataagactcatgatcagaccccatcgtgtctggcgctcctcagccagacgggcaggctcatggcgcactgtgcttggattacggcgaacgaactcgatttcgtctactcgctcaatccattcagcatatggattgtctgattccattaactgggaaacggtcaaatcccgtgaaccgacaggagctgcgaactgggatgtgctttccagaaaaggcgacggcaacccctcgtgtaagttaatatcggacgctgtggaagaatggatgattgtaaagctctcttgtgttgcttggttctgagtcccaggctgaccatcaacaaagacaacaaattcgtcgtcattcattgaggtcattgacatgggcgacgagccaccaaaacggggtgatggccttgatggctccattggaacgattcttcccccagccgtgacccgctggtgtttcggggaagtgtgcttcttcaggaattgagcaaaccctgcgtcattcgtggggaacacaggctcaaaggactttttgcttgtgcgagtcgggcgattcttgggtgctttcgatgctagagttttgttcggtcggaataacctggctgactctttagtcgggcgatttctcgggttttctgaaaggataggcttcttgcttcgatcaagacgcgctcgtctgcctgtggcgatggtcagcaagttttctttcattgggttatacagactcgatagccctgagacccacgacaggtcagcttggtgtactggaacccagttcgcaccagtgatccaatcgaatgtttgtctctttagggaagatcattgatcaaaagcatcgtcacaaagggaaactcacagtattttgcttcactggtccacttgcagtgtacacctgtgtcctggcacaatgccaatagtgttggcaagttatacttcattttgttcatggggatgaaatatttacctgtaagaataacagaaacgaaagacttcgataaaaaaaaaggaattgttgaggggatccaggtggaaggtacagggtcaatgaagaaggaacgagggctcgaggctattcagaacagatagagaccagagtcacgaggtctatactcgacgcgtccagcacgcgtcgatattggccagtagccctaaacaggaaggaaggacacttgaggaaggcagagagagaagacaacaaattcgaaaacgaaagaactcctgtccaaaaatacggttacaacataacagcctatacactctcccggattttcacaggttgaaggccactgtgtacaccccaatactccccattttcctcagaaggtgacatcacttccatgccatcgggttcaatattcccaatctctttttttccctgcctcatctcccagcttccggtacgttcatgtccctgtacagccactccaactccagcggcgagaccactggatgcttgcgtactatcagtcttggagtttccccatatgggttcactgaacgacaaatcggtatcactggcaagtttactaggacctttgaaccctcccaagcttcctttcttggggtatcttcccttgcgagcacgacatatgaggaacacaatgactgctgtaagtccaatgacagcgagcgttgtaacagcaccaatgactccggctacagcgggagccaaacctctattcttcttcggctgagatacggtctggtctaacactccattgcagaacacagtttcagcgttgcagcgtaggcaccattcttcggttgatgccagcgcaaatgtctccagctcggaatgaaactcagtatatgggattgacgcacgactagggccgtgtccaaagagggaatacatttcgaagtcggtggtgttgtcggtcccattgtgaagcaagaatctcacgtacaaattgtccatcccagggtatgttgggtacaagttgctgctgttctcgtagctgtacagctcgaaaacaaatgagccacctcgtaccaagcgggagaaaaagttgggttgatgctggtttgcgagtcccaacagagacgacagggcaacagctggctcatcaccgccgaacaacagagtcatcttctgccgggtgccacttgcctggatgttcagatcgaaggcttctagaatgctcgatgccaatgtctgcccggcaattgggctagctactctgatcgcagacccgctggaagatgattgttggctgttggtgctccatgcgtactggtccgccagcgagcgagcacggatgatgtcggcgtggttcagactttccaacaagctgtcattatgcacaacttcataatccaaatattccgagattgcaacggcatttgtgtaagttgcagaagtatcatcgtaggctccagacaatgccagtttccatagttttctataaaaggcgtctgtgtctcgtgtgatatcctgggcttcgttactcccacggtattcgccttcggcggcattatacatgtcacacatcgcgtgaccttcaatcaaaatagactgagggtcggcattaccgactgtaacaatccgagggtattggtatccgttcaatggcgcctgtgtaaacgatccgttcgcaatttggctgctcggtatgttcattgagcccaatggtgggtatagaccctgcatgaaggcttgggcggaaccaacaatgttctgatccgttgccgagagcacaaccacatcgtttgagtccaaaattattggggatatgttctggattatagtattagagcctccagacacataacgataacggaaatccgatgctgccgtggcgagttcgttggctccgtagtcggtcaatgttcgagagctggtgagctcactgggcttgctgtctccgtagacggtaaatgcaaagactccccatactttctggatggattgggagtcttgggcagagaccattaccgggccctgaagggccaggagagtgatgaataggctgtacatcaacatggtctttcaagcatcaaagaacagcaggccttgactggatggatggattgattgactagctctataaactacgggggcaacctctttgtagtaaagaaactcggacctccatggtccaggcctcgaatggtatggtagtgttagggttacgaggataccagggaaccagacggtgagatatccgctttcaggagccggtagtactgctagtagacataccggctttctattcgcgaatatcaaaactcaaggcactccaagctttcgggttcttcggatggtgaggagcagctgaatcttgacgacactattaaccttgcatgtagattcattacgaagtgtcaatcaaaaaggatacttgaggagtcactgggagctagaagtgtctagtcgatgtcaataataaaccacacaaaccacacaaaccacacactatatatattgaacagtaggataacttcattcgatttataaattcagaaagtaccatgaccgaatctgaattttgtgtggatgttcatcacagctcattttttcatacgattggtaggctcaaggttgcacacaacttatacaggtggcataggattgatgacgcgcacaaattatccgcaaagagagagtcgatgggacttttatatacaccagtctacatagatacctgggtcataatttactaattgtagataatagtatacagaacgatagaatgctgtttacggaacaaaattccgtctaaagattataagtagcgtacatgtaggcatcactagtgagcaaatcgccaaatgtatacatagcacgctagtcttaaaacggaactagccccctgtgaggtacctgccgacctacaatatacggagtacatgtacataccatatgtctctctggatattgtcatgatatctgcatattttggtagtattttctcttatgcaagccagtttgagccaagaagattggtaaatctggcccaccctcagcggcctcggagattatctagctgtaggaactcaagatcacagagatatagataaagttcctagagacgatagcagatctctatgtactcgatggaacaattgattgcctcattctcctagagaagatatttatcacctttttcccggactgtctttcttctaaaacctgggcagaataccgaaaaatcttcagcgagagtcactgggctatcgtagatctgataattgatattattgaataagagacgggtttcatgccaggcatataaggtagaacaagttgatgatcgttcgagagacctaaaattaatacgaatgatgtaccttttgcatggtgaacacacgaaaaaggtacttatgaattgacgagataaacatacgcacatttatacactcaaccacgcaacttccgccaaggtttccttctcccctctccccattaccttccttccacgaacctccacgcatacatttttttgatgtccacgcttccacccatcacctccgaaatttctaccgcccggcagaaaaatcatattttgctcctccatccttcttccgcaagccctacaaatgcgccctacccctaagccctcatttctgctctcggaagttgataccccgacaggcgcttattccaaatggtcgagactcgaggcgcgcggccatcattcgatggccaggaaacatccgactttcctcccttcccctctgatggaggtgacattggtaagtgttctcttcaagcgcctcatccgatcgtcccgttcaccagcctcgaccaccccacccatacctatcaccctcatcgccaatgggacctcaatataactctagaatcaatactcaccttttaaatctgtatcacagaccaaaaagtgtctcattccctcgacgatgaggagcatggatcgcctccggcggccaagaagcgccgtacaggcgatagctccaacggtgatatttctctgcccgacggagtcaccttgatggccgatcagcatggccctggtcacaaaattgaagaagaattggcctcggctcttggcgaaggtgttattgatacagttgagcagaacgttctcgatgtgaaccaaactcttcagcatagcactcacaacacccatgattcctctacagaggtcgccactacccaggacggcaactctgatctcaatcacgacgtggctacaatcatctctgaaatcatggatcacacagagcgtcaggagcaaaccgttgcaatgggacctcaagaactaccaccgtcgaatgatttcccaggagccagaggttttgctttcctcaaggccaactctcacctcaagattcagagtctccctatcctggataatcttgtgagttgaattgatactatttacacaatctcggcttcctaacatctggccaatcatctcctagtcgacgcaaatcttgtcattcctttccaaaaacacctatcaagaccttactgctatggtttccgaacctgactccgaaaatggccaggcatatgccaccatgcgctccttatttgaccatacaaagcgagtctacaccgtcaagcactcattccttcagcctacggaccttgaaatcacagacccttctcaaattgatgtcattcgcaaagcgaacctggcgtcctttgtctcgagtatctttggatctcaggaaattgggtttgcggacctcaatgatcatttcttagacgtgtttgtccccgagggcggtcgtttactgaaggtccaaggtgctctatacctcgaactcaagacacaggctttcatcgcagccatgcataacaaatctctcacccgtacacagctcctctacaatctgttcccggacgacatggaacaacggttgttggcgagacgtcctggtaccaggcagctggcaccatctgagacagatttcgtgaatcgtctcacctctcgccgtgacatccttctcaatgagatcaacaatgaggaagcgctgaatgccctgccggataagtatcactgggaagatttcctccgagatctcagctcctacatttcgaagaactttgacgccatcaatacccaacaggttcgtttgttgctctttatcttcctcaaagattatttttatgctaagatcatctagggaaagaaagccgtcaagggacgtcagccctcgagttcaaatggcgatgctcacgaatcgcccaacaccacccaccagggtcaattcgcactcaaccaacaagttgaagtcccggtggaccgaaacatgcatggcgaccttgtcgcacgtgctgcccgagcagcgcagattgctctacagggccatggtctccgacgctctcagcagcagtcgcaacaacagcatcagcagcaaccccaacagacccagtctcaggctagtccgtcgcctctaccgcaacaaccgcaacaaccccagcaccaacagccgccaccacagcagccgcagcaacagacgatccaacctgataatcaatatctccatggctacactgctgcacaacaatcgcagccagttcaccaacaatatcatcatagtccgaccccccctggaagttatcaaacacagcaggcctcccccttgactttccagcagagcccgttacaggccaccttccagcaatacaaccccaatgcagcgcaagctatgcaagctagagcaaatggcatgtcctccaaccatggatacatgccggggattccccattactctcagtcacagcccactcaggttctctacgagcgtgcccgaatggccgcatctgcaaaatcttctccgactagccgtaaatctggccttcccagtcagcgtcgaccctggaccactgaagaagagaacgcgttgatggccggcctagaccgtgtgaaggggccccactggagtcagattcttgctatgtttggacctggtggaacgataagtgaagcactcaaagatcgtaaccaggtacagctgaaggacaaggctcgcaacttgaaactcttcttcttgaagagtggaattgaggtcccatactacctgaagttcgtcaccggtgaattgaaaacccgcgctcctgcccaggcagccaaacgggaagcccgtgaaagacagaagaagcagggcgaagaagacaaggcccatgtggaaggaattaagggtatgatggcccttgctggagctcatggggcacccgtgtcgggacacgatatgtccgcctcacctagccttccaccggatgctaacagccagtccgtatttgatcaaaccgcggaacagaacctcatgcagactttgagccaggaggtacacggaagtcagtaccctcagcagcatgctcagccaactcctgatcacatcgatcctcatatgcagttgggacagtagaggattgtcatatccaaccatttgtcttattgatttagctttttatccgcaagattcatcatgtgaacttcggatttgcaatttcgtttcggagtctagggctggattgtgatatttgttccttcgggaaccacatttgttttactatgggattgcgacattgcgccggactgggcgattgcttttattgcatcccaattgtatgagtacatagtgatacatttcaaataaatgataatgaataaaataaacacactctttagatgtagatagctttagattacaatatatatgcgttgatacatagcgtggtagtcgaggtaggtcatcagatggcccgtgcaccacccgtgtgactttgaatctccctataaacgaacgtataaccgccgcagccattgattggccttgtacttggaactctgcagcccagtctcaattaaaggatacttgcagggtttcccgccgatatttgcccaacatggccgactctcaaacatcgcaaccttcccaacccataccccagaacggatcacaagagcatccccctccgaccgaatcggaagataacatcaaaactgagcctgatcttgatgtttccatcgaaaaagacgtcgatatgaacaccgagaatcagaccgaagcgaacgcgaacaccaccgcgcctggccaagatcccatggcccccgcgccagaaccctccaagaaggaaacaagcttgcgcgagttcctcggcaagatggatgactatgcaccaattgtaagtcatctctaaaacaagactgtaacctctctgagcttcccctgatcgcctggtcacacggtggaccacggcatccccgccaccatcgattgatcccaagatttcgcgcaagcgcatcgaaagcgagacccatgatataaaacaaaagacccatcggacaatcaaggaaaagcaaaaaaaaactgaccttcgatctccagattcccgacgcagtcactgctcactacctcaccctcgccggtctcccaccaccaggcactggccccggccaaaccccacctcacctggcgcgactcctagcgcttgccgcacaaaagtttgtctcagacatcgcagcagattcgtaccagtttgcccgaatccgcgcctcaaacagctcctccgcaaacaaccccatcggcagtctagcagctgcggctggtctcggtgctccggctggcgcaggtggtgccccagctcctggcggcgatggtggtaagggtaataaagcaggcacccatctcggtatccagcggcctggatttggaggtggtggctcgggtggctctggtcagggacgtacggtgttgaccatggaagacctgggaatggcagtctcagaatatggagtcagcgtgaagcgaggcgagttctacaggtagtacattgatggaaactgctcttcggggttttgcatcatttgtcttttgcattttcgggcttatggcgtttaggtgtgcaaatggtcctgcgtggcctgggatcatgactgcattgctagtctgggctggtgtctgggcggatccaatggatggcgttttctcttttttcttaactaacttttacttactagaatctgtgcctgcaatgctataggaactagttaagtaatgatatgaacatttctcatgtgttgctagcttcgaattatgcatcagaatctataagaacaccgcagattgaataaggactattactcgttatttgccttcctatacaggttctatttgggtattgcactttattcgcagtttgaatctaggaaaaagaaaattttatattgaactccgacccaaaagcagctaatgtcacaatgaatccaacgatatatctgtacatagtgtcgcaaaataaagagatgtaatgtagctctcctagtacaaagaagtatctgcactaggatgatcatgcgagtcgtttatttgttcttagactgcttgtatgtgaagcgcttgcgggtcctgtagagcagattgaatgtcagtaaataaccgcatcattctgagcctgctcatcatgcttgtgctgaacagacgtagaaatatgtatacatacgcaacatattctccaagcttccgtccgaccatctcctctgtcacctggatctcgacgtatgtcttgccattgtgtacagcaaagcgcagaccgacaaagttcgggaggatggttgctgcgcgtttcgtggtgcggatcgggggggtgttgggtggaggggggagggtgcgtgggagaggaagactgttttggataatccagtcagctttcaattccagtatgagatgttcccgttgtaaaggttttgtaggttcgaagggaggagtttgatttctgtcacgtacgggacgatgtttgggcctgttggaagtattagcgtgtggcctcttaggaattgatcctgaaatagagatcttctagatccgacaagactcacctttccagaccgaccggccgaaaagggcgcgtgtggggaacattttgacttgagggtttccgcagttgcgattccgcgatgttgaagatcaatgtcgaagtctcggcgggattatgtcagcacttttatagaggtcgtgggcctggcgcgctgaaagaatgaatgcaataaattggctgagtgataaacgaagatgtgatctacatagcgaattggactgaaataaaatataataaaagttgctagtagtgcatccaacggccgccagcaactgtgggcacatgcgattctatactccatctcactctgccagttcctcaaacatcttaacgaggctgcgcacacccatgagtagattctcatccgggccttgtccaggggtccagctggcatgtgcaaaatcaatcaggcggagggcgtggactttaggagtttcgtcctcctcgtcatcgtccacgtcgggcatctgcatggtttcggggtcaatgctgatattgatagcctgttgaggcatcccatcaccaagctggacattaaccatctggaaagcttcttcgggaagttcaaattcctcgtcatcttcatcatcatcttcttcttcccgagaacgggttgctggggctttctgttcctcttcaattgcctgctccatcgcttctatatctccttcgtagaccaccaatacactcgcagagtacatccggctctcttttgattcaagaacacgctgcaagtttttcaattcttccgtcaagcgctgggcgaccatttttgatcggtctatcttgcccgcctttgcgccagcaagaaaggtttcaaagccttgcttgacattatccttactgaaggagcgaccgtaccacttgtcataccgccgatagccatccttctcgatgacttcgcctctttcgccctctgcaccctcgtatttcgtagcatacgggtttgtccgatcgccctcatcggtctccccattgtggccagtccagactttcatgcccgcgatgcgatatccaacgctagaactggtggtttccttcgatacggtatcaagtttcttccgcttctcgagcggcgcatcgtccgcccataaacgcgcgccgagcttaacgtccagcacgtttggccgacggaacccacaggcgatgttctccagcacgatcgacaaaccagtatcgatttccttgcctccagagggcacccatactgattcctccttagcaggggcagcgccgtctttgtgcgtggcggttgtgtgggatggcggttggctaggctgggagaaatcggccgttacgtcgccgggctcggagaggggaaggatgccagattctcgggcggcagcaatcgccagcggttgctgttgttcggaagatgagagggatccgacgtagagaggcatgaactcctgtaattccgggtggagcgcgctggattcgtagaattctacctcttgccgcgtgcacggtttcgcgatcagggcgccagaggccgtacagcgaacgccgtcactggatagaaatatattgttagcatggacataaatcaaatatcgtactcgagtccgccagtgttggttttctttcgcacacccggctgggttaattcgtgtgggacgtcgcgtcagggcacagagcggcggtgtggaacttactgtccggcagcagcatggtcaaaagggatcagatcctcgctgcccagctgtggtgtctttcgattttctgatttcgaaggcattttgatacaatcactcggctcttatgacatgaggaggtctgtattccggatgccccaaacagctggagtagtcctgaggtgtagagattcacaggtatctttaagcctggcaaatagaatgcaaataaggtgaattgtttaaacgtatgctaaatgctaatatatgagaaagaagtgagatctggagaaatgacatcccaaacgcgggataaggggggtgggggcgatgtcactctcaaccctaatcttagatgaactatacgatctgtgtatacaacattgaactcactaacttatccattcataattgtaattcttggatttttcctttatttattttctcctttcaaactcaacaaattgtaaatcatcttataatagtgaaagaaacataaggttgtttgggtgtttggttgtttgcctgatctcatctatggatgaggtttataacgactaatcctcacaactaaacatcacgactaaacatcacgactaagcaatcagagccttgctattaagtcttgtctctttgttttgatctttccttctccttccaatatttatccttgcttctcgcaacacggaaacttcatcctttcaacctcgttacttctatcattcatcatggatgaaaggcccgagcctacccgtgaagacaatttgtctccccctgttcagtcgcttaatcctagcttctctgatgagcctatgaagcctactaaagtcatgactggagacggtgcccctgctaaccttgaccccaccatgccggaccaagagcatagcgaagccaccgaggaaggatccttcatctcttccgcggaatctgtctctgaattgcctcaattatctgctaagcaggctcgggttcatttcattgaaccagtcattccggagctcgagaagtcagaggatgcactcaagactgagcatgatgtgagtgtcccgattctatctgcccaggatccaatctcctttgtatcataataaatattatgctgacactactctataggttgaggagcctttggcttgttcggatcaggagcctaacaagcatgtttgtgatgaagctgaccttggaagtgctttacctcgtgtttccatcgctacggaagagccagagaatactacggacaactcggatatgaaggatggtgcgaactcggagaaagaacctaagattggattcaggcatgatcccgacgaggaaagggttctcgcaaacatggaacttgacgatgatgcttcttcgaaatcaaagaagaagaaaaagaacaagagacgccccaagagccagagaggagaggtaagactgtgatactgatgtttaaacaaccggattctgtctaacagcctttaatagaacgcgcccacgggattcgaacccttctatgccgatgcaccaattactccgaaggagttcgaggagaacaagaacatctatgatccgtaagtacaattctaacttccaaactgagacattgtctaacacttcatgacagtgctttgcccattcttgagtaagatccccagatattatcgcataacagccactaatatgacctatctagtcgaattgacgaggcgatcaagcgcttcttgtacaaacgacgccttgagccctacagacgcaaggttttcctcaagtacctacagtacggcggtgtcagcgtgggccccaaccattcgcagggagtgactccttcggaattgaaggagatgtctaaagaagaggccatgcaagctcgctgccacacggccaccattcctaagatgggaaaaccatacccaatctctttcaatgacgttgccactggctacctgtgagtcttataatatttgaacgcttattcgagtcatgcatgctaacttagttgatagaactgggtactacatgggctactacaatcctgatactgaggaggagatcaaagtctgcactgacaccatgaagaacttcttttcctacctgctctaccacaatgtttgccccgagcagaacgaggaccttgaggaagctcgaaagacatgtgatcggtccgccaaagagctgtggatgaaccagcaactcgtacaccatcaaggccccggagacttcaaccgcggttgctccttgctgtttggtggttactacttcgaggatgtcgttgaccccgaggtttggtccaacattcgatatgctgaccagaaggtcttcaccgctgaaatcgctcgcaaggtcgtcaaatatggcattgcaattgccgggaatgatcggactgctcgcaaattcaagatgattgctgacaaggacatgatcgaagccaagcagattccggacatcgatggctttgaggtcatctccgtggaggaacctagtgaggaagtcatggcatactacagggagctaggccccgatctgatgccagtgggcaaggttcgaagcaaggaattccgtgatcctgctagaggtcccttcgacctcactccctgggaaaagatcgactgggatgctggttttgccccaacttacgagttcgaatttctcgtcgaagctcctctacttgtccatatcttgcccggcatgaagattatcacagacgtctatcagaccaacttcggacagtactatttcgatgagattctgtcggtcctgccaagcttctacaagttcatgcacaatgactggatgatggactatgtggagccagcgcctatcaacttcatccccgacgaggaggaagtcgcacgtcggctcgcaaaggagtctattttgcgcccccctgagcctaccccagccgagtgggctatgcatatgctgacacacgagttggactttgctgtcaagcccggtgaggatcccatggtcgctgtctggcagattatccacaccctagaaaacttcggctgggacatggaggaagtcaaagacctgatgggcctggtggatccgaatccacagaaaggcaagggaagttcggcccaggaagagcagtcccactgtcgccttagcaatgagccccgcaacattcccctgttcgaaactcctaagcaggccctcgatcggactatcaatcatttccagaacccggaaaggatcaagcccgttatcgcgcccgaggtcatcgcgaagttcctcaaggagaaaaaggaaaagatagaaaaggaacaggcccagaagaagatgcccgaaatcacgatggagatgatcgtgaagttcctcaaccataagaagaagatgatggaaaaggaaaagtcgaagaatggacccaaggcatcgggtgagaagaaggctaccaaggatcaggaacctgaggtacaggccaagaatcagacgcccgatatcacgccggaaatgatcgcgaagttcatcaagcacaagaagaagatgatggaaaaggaaaagtccaagaatgaaacccaggcgtcgaagattacgaagaatcagcaacctgagggacaggcccagacttcggatgagcagcatgatgcgcaagaccaggagtctgagggacagcccaagctaggtgcccggactccgggtgagaagattgcgaagaaccaggagcccgatggacagcttaacctggaaccaacggagacttcgaaggagtaggctggtgagaagaatgaggaaaccgagactgaactggagggggactattagtgactgcaaggtcactaactagatgcagctatctgtttacgaggtgatcagtctgctgcaaatctgccggggggttttccgaatatgttttagccaaatgcagcacgagaaaatgaaattcatatggatatcaaaggaacattgacaccctcgtatcgtacgtagtcttatattatcgaacaataatctgttcctattgtttaaaaaccccaggtcttgactcaaggcctcagcagtgacttccccatggtcttccgtccttccagatcctgttaagcgagttagaatttacaatgaggattccacgcaacgaacgacagagactacataccttgtgcacctgagcaatgtcctctagcggatatatgttgtggatcttcgtcttgagctggcccgacttcagcaggccaaacagctcagttgtgtaggatttgaactcttccggagtctgtatgtatccgaagagcgtagggcgagcaaccttgacacacttgggggaaagtttcctatagaaatatcatgagtatcactagccaagaccaatatagagaggggaaggccatacgcaagaggaagcgggggcacaggaccactggcattgccaaaccagatgacagtacccttgcgcttaacagcctccaagcttccctcccaggtgtctttgccgacagaatcgtaaacaacatcgacaccacgaccaccagtggcttccttgacctgtttaacccagtccttgccctcttcgctgcggtagtcaatcaccacatcggcaccgaggctcttcacaagcgcacacttctctgcgccgccagcggtaccaataaccttggcacccatagtctttaaaatctgcgtcataaggaagccagcaccaccagctgcggcgtggagaagaacccaatcgcccttctgcacgggataagtctcctttgcgaaagcaaggacggtcataccgctcaggaacgacgccatgacatcctcatcactgatcccctcggggatcttcgcagtgtgggccgccggcactgcggtgtactccgcatacccaccagtagagagccatgcaacccgatcgccgacctggaagccagaagtctcgggaccgagagcagcgacaacaccagcgccctcgcggcccaagatctcgggcttgggtgaggggtacaggccagttcggaagtaggtgtcgatgtagtttacaccggagatgttgttgcgcactagcagctgtcctgcttttggggtaggaactgggtatgaggtcttgaattgcagcacctcagggccgccggtctgctcgaccactacagccttcatggttgttgggacggacatgctgcggattggaatgaattggtttacaagaggagcaatgtgattgtgaagtagtgcgagtcgaggactactacgtgtaagagagcgaaacatagtaaataagtaggtggggggtaagagagatgttaagacatcagcttcatatttgtcatcggatccccgcaatgtccagagtccggcggaattgttgcgctcccttcttttcttttcttttctctttcttttcgaactcgataaattccaatcttagtgtttatacggaatacagcgcatctgactttgataacgcgcttcatacaggttcccaaattcaacatgattgacatgtcgactattcacccattttcacagggatatgacgccatttccgtcggaccacccgtcggaacaaggctatgttatgcgaatcattgcaacagcagtgcaacatgggcttgtcagggcaaggatatccaacagatccaatgcggcccttctctgccaggagactcatagcgccaacccaaagcccctggccagatctgttgctgtattagcgcttcgttttccgtacaaagtcaccatgcaagccacccggagccccatgaggggcaaatccccacgacccacgacccggcatatgtccgttagcccctagctgtgcatgaggacgacatagagctttgcgtgtcatctgccgctgactgcatcatgaaaccttggaagaaatagatctcccccgctccataaacttgagacaatacgcaggccactagcctctgatcggtccgatgtttcctaaacaccagcgcccctgaagaacgagatttccacttgttgcccaatgatccgatatgcatctaaataaatcaacctgaaacgcagcggcagtacccggggggttccacttcgtgcccaatagtcaacaggctgccatagccacactgtcttgtctgcgcttccactgcccttgacttgtgatttctcttcagcctgaagctattcttgttcgtatttttggtcttgcccaatcactcaaatggcctatcagaggtctattccttcagggtgatgcccgatgccatccactgatgcttatatacccctgtacacccagctggcgcacgcactttaaagcgagcatctttgtctactcccacgaaaaattttctctctctttcatacgcgccaccattttctgctcccctgcaaactttcgcctttcaagtccgactacttatactatgaaccacatttcccgagctattctacgagacggtaacgcaccaggttaacgtcctcaaacaagcatatcccatacaatctgtgtggcaaaaataattccatttggaaatggcttcctctcgaagctctcgacgggcgcgaccgcaatggcctccggcgccctccgtcgaggaagagccccagtccctctcgaaggagttaaacggtctctccaagcttggagacaagcccgggttcgacggtgttcatataagaggtgctgtcgatcagtatcccattatagtcgccgccaactcgccccctccatcatctacctcccctgtcagtgttcccggtgtgtctgggctcgggagtgtgtcttcggatgaaagtgcagggccaaagacaccgcctcctcaagagccgatcttccgaaacaccgtcaggtttgagacgaatgaccggccaaaatacgtgtcgccctcaactgcaagccaaccacgcggcccagcacctcagcctctggcccagcagcagcccatccgtgagcttaacccaccgcgggtacctcagccgccctcccatatccgggatagcaattttagtagacacgggccgccaatgcaaaacacgtctcatggctctcgcggacctagcgcgccggatcgcagtgatgcgcgagcgcccatgcaggacaagacttgtctacaacctcccgggccttccatcggtcgatcaaacagtgcgagatatacccattcgacacgaccaatgccagaacgccttcgacgggagcctagctcggggtatttgtccgattcggccaccacagacaacagaccaccgcaccggccacagccgcctgtgtccacggcccctgtttcagctctgccaaatgggcccaccctcgcagaacggattgaggagaagcttcgccaacgacaagaacagcgggacccgggttttgtgtcggatccggaggtacggcaaatacccacaactgtgaagcccgtcaaaccgcatattctcaacacctctctgccccctccgcctcctattccagcaccagcatcgcactcgcctttgcgtggacctcagcgtgtccccgcccaacgatcacagcatgaactgctcccggcctcacgtgcccgcgcgacatcggtgacaatgccgcctacccggtcgatgtctggatctcgccatccctcacgaccagcacctgagatgaccaagcctatatcaaccccactcaatcctgaccggtcgctggctcatctcgcaccgactagacccgcagccacatcaccacagcgccctagctcggtaggcctgggcctctccccatgcccgcgaaccatcgccgtagcaggttaccaggattggtatacgctcaaaggcctcacccacctggacatctgtccatcctgcgtgagccaattatcacagtcccgctaccgcgactacttcattccaagcctctcaaagccagccggacaaaagacacgatgcgccttcgccaacgcatggacccgtctagcctgggcccagatgataaagaaacaacacgacagcctggagcttttgtaccaaatgacacgcccaccaccaggcatgcgcgtctgtcccggtcgcatcgtcgcagaacaatcctggcatcgcatctacgacccggaaaccggcaccgatctcgcaggcttccacgtctgcaacagctgcgcgcgcaatatccgcatcctaatgcccagccaccgcgagaccttcctacccagccgggatcccagcgagcggctgtgcgacttcgtcacgtccagtccgcgattcgtgaaattcatcgatctcctcgatgcgtctgcatcccgtgctgaagcggactcctcgcgcacccgtcgcccggatatgcgcgagttcctcaactacgcgcggcgcaaggtcgtgctgcgtgattgccgtcgcgataggcctgctctgagtacgtggcactttatcccgtcactgccggagatgtgtgtctgcgaagactgctacgatgaggttgtttggccgttggcccggtctaatcatcccattgcgtgcatggtcacgacgaagatgcggatcttgcctggtgatggccctggtcggactcgtgaggcgagttgtcagctctactcgccacgtatgcgggcgaagttccgggaggcggttgttacggatgattttgggttgttgaggtctgtggcgcagaggagggttgaggccgagcggcgattcctggatcgaagggaggagttgttggttgcccaagcgaaagggtatgattgtgatgaggagatgaggaaggctgttgatgagtggaggaggtgggaatgaggtttatggctgatgactgtctgtctagtttccttcatgtgctttgatttgtgtctataaatgcatgtatacttgggagcattggggtgtacaatgactggagggagttttgttttattttgtactagcatagcatagcatatatataaagtctgcctaggtagaacatagccctgtattatccggtattagccgttgtcatattatcctagcatttgcttcttctatatgtctttctagatgctctatatcataatgtagtctatcgtcgttgcctcagtagtaccttcctctagtaagtaaacatctctttccaaggaaggagacttgtcagctcttaccctctagggctattgccatatgagctctttggtacttgcaaattcgtctatttgattgtctctttgacacctccgccttctgatccgaggctaagtggagcattcggtaaagaaagagatccccatctcatcatagtcagcgacatgctattccaagcttgtacaagattacaagctacatgcacattgagcagacatccgtagatatattgattgtatgcaataacgagccacaaccccatgctaagtgaatctagatccctgactccatatctaaaaagaagatgcaaatatctaatgcaagcaagcaagaaacagaaaagaaaaccaacacctagcccaccaaccccaccaactccccaggccaacgctttgcccatataatagcgcgtggaggcattctcccaccaacaggcgcaagcacacggattttacccttgtccacgtcaacgtcggcaacatacaagaagcccatgatactcgcgtcgcggacttcagcgggggatgccgtggtaggcgcatgagtgatagcaaggagggtatttgccagagcggagggagcgggtggaaggacctttttcagcgggacgctgctgctgctgttggcattggcattggcattcacgttgtcagcgtgctctgaaaatgagcccacaacaccagggagcggggcggcccggtccgggtcttgctttgtttcttgtgaggcgtagtcatccatgccacccccgccggggaggaaggagtcgcctgttcccagttgggaagggtcgtattcgtcttcgtcttcatcgtctgccgaggagacgatgtagttgtatacggggagggaggcgaagtcaagttgctgtgcgtggggggagagagtaatagcggaagagggtgaagaggaagggatagggttgccgaagaagtaggagcggatttgggactcccgtgttgccttgcggaaggcatcgtcacggtcgacacagccaccggatttggaaagcttgacgacggagatgtgctcgtcgaagacagcggctgttgcgctggaggtgggcttgttatcatattgtctagcaacggtgctgtataggcgctccgaacccagtactaggatcgttgtaatcgagaactctgtgacaatatgattaatgagctccatggtgccaggcttgtctgtgccaaggatcccgggcgtatcgacgatgattcccgtttcgcgcgcatcctcgtcttcggccatccggcccgtgacagacaatgccagacgcgagacgactggtcggtacacggcgccttcgccatctagcgggctttgcatcgggtagctatacacaagcggcagcttgacaggtacggggctgggcccagacatgggactgcttccccagccgtcttctacgtccaagatggtgcggaaggcagtcgcggtcagtgtgccagggacgccaagcataccctccgtagggtcgaggttcacaaccaacggctgacgaccgatcttggtcgcatatgcagtcaagatcttagccaaactagtctttccggtgttttcagagccaagaagtaggacgcgcgggccatccttgcctattgattgggcttcttcgcgcattgtctctagcgcaaagtggacgtttgcatattctaccattggcgtttcctcggccgtgtattcgctttgacatcctcctgcgccgtgacccactgtcggtgtgactccatcggaggtagttgatgttgtttcgaccgcggtgacttcaagtgcacagccatgccatgtgaaaattgccgcctttgtgccggtgaatgtgtaggtttgcgattcggcaagctctgtaccgaagagttcagccgttccgttgagaagctgcacagcttgagtcagaaggatcacaatcagattagatgagataacatacctttactttgatgatatgtccaaaggcaacctcgaaccgccattccgaacctggggtcaggttgatttgcgatggtggcgcgggtgcctgcgatctttcctccgatggctgggttagctcgaggcctggaagtgacatgttactgatcaatttgagaaatcccagaggaaatcccagaatatgtgcaattattgaaggagtgaaagaagcatatcgggcggagctacagcatggatgttttacatgtttgcattagccgtttactcagctgtcattggctaaagtgattacctccagagaactccgtactatgtagttagacagatattgttaaataactagatatgaatggcttcagtgaacgtacatctgagagataagtaactggctagaatattcacaatgccccaatacgctgactagtcgttcctcctttggttcaatatttggctactacttcgtactccatgctcaaccataccttgaatagcactgggcatttattgcattatcacattgcataatagatccattagaggtaaatgcagcgacttcatccatatcatttttcattgtttgcgcccacatgcctggtgattgccttcaattggtaactaaccatgcctcacttcagcttcgagtagaaaaattatgtaaacattagaacattgaaagtttttggtatcagctaactataccaagattacatcaaaacagatgataacctacaagaaacataattggtaacattgaagcatatcactgtcattgagcaatcgtccttgactacttggagggcagtagaatgtgggagagggggaaagttggtatcaggagagcaagggcaaggggcataaaatgagctaaaggcaatccaaataaccaagactggtgcaaaacacagggagagggaggggaggcaagatattaggaaatggtgtcaataacaggcagagggcactcagaaccagcgaggaatatatttatggtaacgacaaggggaattgggcatcagaagcgaatatttgggtagctgggctgtcgcaagcgacaaacccgccgaaaagagaagactaaaatttcaaacaaactggactttgtcaagcaaaacctcattctgtttagaagaagtatgggatggaggccctatataggttaggattgattcgggatcttcgtggcatgggatgacttacgcaagggcaaaggccacagagacaccaaagatagaacggttgcggacacgctcctgcttgagcttgttctcaagcaccttggctttcttggctcgttgggaagattcagccgatgtctcttcatcgtcatcgtcctcggccttgcgcttgccagtcgccttgatggatgtcgactccacagtagcgccctcggcatgcgccttgatagcctcttccaccatctccttagcctgggcgatcatctcttcagtctccgcagcagatggcacttctgggagactaatgggcatatccaaggaaacagtagtgtgggtaaacttgacagcatcggtggcaccatcggtcagtaatacctcggctttctcatcctgttccttgatttcctccttcttcttctctttcttctcggccttcttcttctccttcttctcctccttcttctcctcttcgggctccgccgtattagatctcgttgacttgcgcactctgatcttctttccaggagatccgctcgacctcacttccatttcagcctccacagctcgcaactcaggaatcgtgtccgagaggcctgaagctgagatatctaatgccgactgaaggctagcgtttgcagcgattgtagacggggtgttagtgacatcgttggcgaggcgggtgctacgagacttccgaggagacgccaacctcttgctcggagaagcggaccgacctctgcggttgcgctgcgacacggggggctcatcggagggaatttcgaatttcggcggaggggtgatatgcttctttgcgctggaaggaatgtccgttgggtccaacagtgctcgcacccaatcgtacatttggtattccttggagagctcaagggctaggtatgaagtcaggctttgtttgatagagagaacatcccaggcagaacataccaaataagggcgagatccacacatttccagcaacttcctcctcgcttgtgtactcgcgagccttcagatactcacgctctgttctctcttcctcggccttcgcccatgggaatgcaattttgaacattccagtcgcgctaacaaagccatctttactacggcgctgtaatgatgaggcccgaagttaatgaccgtcggcctccaaaataaacaaaacaaggggtctcaccatcaggaagtagctttctgggtgttgctgggaggtgtgggaagggaagatctcagagccctcgagatccttgggcagcggagcacggaggtgagcatactcgaatacgcctaggttctccggcttggtggcatttgaggtgccaatctgggccgccttgacggagaggttggtttgtccaagacgacggcgcgcaaggagttcgtcatctgtaatcgagagtaacacgaaatggttagcgatggcagcacggggcgggtagatagccgatgcgcgcggtcgcgccaccacgcgccagtgtttgtacttacaagtgggagcaacctcgaccgtgatgagtggattaaactgctttggaagtgatcgcgacatggtggggatggatctcgagtgaagtgggaatgaatcttagaggatcgtgcgggtgttctttgaaggaaagatgcgccaacgttggccacgtagcaggcgcgtcaagcgataaaaatcaaaggatcaaatatttaccgaccgatcctgtatcttggtagagaaccttacaaccaaaattatgattgataacgggggggaaaaaaaaaaaaaaggtcacccaagataaagaagacaatcaggagagagaagatgcgagtcgcgaataatcattgcgtcgttctgaagcttgacttgttccggtaaggtccggtaaatgggtggtcatgtgtggtatttgaggagtctggttggccaattactctcagacacagtatcggatttactccactgtatctcatttggccccgtgacattttacatttcgggccaacatttccttctttggactttgatcttcatctactgggaatgcggagatactggagcatgtttacaggacattgtttctatatgtgagtgtgattatatgcactgtctccatactgcattgaattgcttacagaaaccctccctacttttccagggagtacatataggtatgtatgtttacatatctatcaacgcatcctacgtgctttatatagagtacattcttcgcaacaaacctacaatctatgttgtacatacatcctaaacgcgggcaactacgtatgtactccgtacctccagtggtctgatcatcggcccccacacctagttggggcatagttggggtcttacggagtatacatacgctcgtcccaattctcttctacaatccatacaatgctgtagaaagcatagcctggcccacacaatccaggcaatccaaactcctggccaatataagcgtgcaggatcaacagtgcgtaaacgtgcatatggagtactccgtacagaagtgggaatccgaatagcctcgcccctctcccaccgcctttctacccccaccaaggtctcaggagactattcgagctttagcccttttcactttcctttatcatttcgagtttccaatttgtttttcctttttcctcactgtccaacttaccccttttccacgacatcacttccccgaacttcaacccttggttcagtgcccccgctttcttaatctgtaaacaatggccgaccaccatgacgatgagctcgcttccaccaccactgagggtttcaaggtcggagagaagaagacactcgatgagtacaaggagctcggtacgttgagtgatctgcaatgcatcggcaatgtctagccctgatctccccagctaaccgtctttctttcccccgcaatagacaaggacgatgaagctatgaaccgttggaaggcgtctttgggtctcaactccggtgagcccattgccgatcccaatgatcctcgcaagtgtatcatcaagtccttggctctgcaggtcgacgggcgggaggatgttattatcgacctgtcctccccgggctcagttgacagcctcaaggataagcctttcaagatcaaggagggctccaagttccacatcaaggttaccttccaggttcaccacgaagtcctgagtggtctcaagtacctgcaggtcgtcaagcgtaagggaatccgggtcagcaaggatgaggagatgctgggcagctacgcgcccaacaccaccagcaaggttgactactccaaggaatgtgagtattcaaacctggcttctatttctatgttttcaagtatggcttttattaatactattccctattagtcaacgaggaggaggccccgtctggcatgatcgcccgtggccactacaacgccgtctcaaagttcattgatgatgaccagcacactcacctgctgttcgagtggtcttttgacattggcaaggactggtaaacatgggttgagagagctatctcgttgttattgagcggccgtttgttttcaaagcgtgatgagtttctttctttgacaaaactgttagagatgtgtcccactggggctgatgctttggattcctgttttattgtttatgcgtcatactaagtctcacttattggtgtatgatattttcatagataccaagtagcacatctagctgtttgtaaaagcgcagccttatcccgaactcctgtctagtgctagggttagaaagaaaaaaatttgaaatacataaacattaacgtcaatcaaacattaacagtaacagtaaccaatgggtatcacgagaagattcagagattcacaagaagtagtcgacaattggaccagagccatccttgctctgctgctgctggcccagctgttcaaggcgatgggcatcgttctctggtgcagcatcaaaaacattgaaaaaccgctcgccagagtcactcacttcgagcacactagccaggtttccacagcggtaacaatagttaggtgcactccagaccgtgctcaggcgatcatcgtaaagaacctggtagccttcttgacagagttggtgtgcgcgtaggatgtgggacatgctgttcacctctaggaacttccgcacaacctgcgctccaaaagtgtatccggcgccgcggggagagagtgagaattcatcgcgttctgtatcggggtcagaccagaccaaatcggccatgggaccttcgtgtggaatctcgcggaaacggtcgataatcttgatttggtcaatcgaatggatggaaggtgacaagccgccatgtacgcaaaatatctcatcgttaatcacaacgctcagtgtcaaaaagtcaaacatgtcggtgaagtaatgccagacgttagcgttgccatatttgcgcgcgcactcagtgtagaagccgtatgattgggtgactccgcgcgactcgtggttaccgcggatgaggtgcactcgttgagggtatcgtaacttgagacacacgagaagtgagatggtctccacactaaaaagtccacggtcgacataatcgcctgtcgattctcccatcagcaaaacttcataccaaaagcgagcaacaaatgggttcaagctgaggcctgcttccatccccgaacagagtattatgcgtgtgactaaccgaggaataggtaatttgtatcaggacagcggccaccgatcctgaaaatctcgatcatatcaaaaaattggccgtggatatcgccgaccacagtgactggagcagcaatatgtaccacattgctctccttcatcaagagttccttcgccttgaggcagattgcctcgatcaccgaatctgcgagcagctctttattgtagagccgagtgatgcactcatctagatcgatattcgctgtgaagcaataggttaacataaccacggagacaaccatatcatggaatcaaaaaaaccatgcacatacttggtagaccaggcattgtggcgagatgcagatacagtgacctcaagacaaatgagcggcaatgactccttcggggtatgatacttgttgttcaataacagagagctccctgtaccttgttcttgtgtcaaggtagacaagtgcagagagctaaaggaaagtgatatgcgagaggacggaggtcgaggtcgagatgggatgttaagaagacgatgatagaaaggatgggtgcgtcaatctagcaaaaagcatcctggtacagccgatccttatttccagtgcaaagtgaaggctctggaattaaagatcaagacggcatcacggccgaactgcgggatgagctcaggcacaagcaaggttatatccacaccgcctttattcgtacacgccttaatttcaaggccacttttagccaactggccactatgtactattatgtagacaattcctttctcggtcctcttggtcaacaattcagagtctaacaatgattagactcaatacggtaggtccctcggctatgggtagcgtggacatattaacgcgcaggatgataacttcaggtcaaaattctctcatagagtcccccgagtcgacgcatttacaagacaatgttggcacccgagacatcaacatacgtcctcatgaagtttttagtacagcaatatcggatactcgtgaagcgaaccggtttagcccgatttctaaacaaaaccatgaacgttggccgcattaactatgagcaaaatatataactagagtgggaaccgcttgttcctctcaagctccctccgggctataaagtagcttcaggtgcagtgaaacactatccaaccccggttatatcactgtttctcttgcctgtgtcgggcggagtgctatcattggagcggccatagacaccggattttaccaatccggaccctgcttccatgctctgctgggaccatatagctactggactaaatttacccggtgaaagctaccttcaaattccgatcataccgcaactatctatctatacttcgtaaggatgttatatcattcgacctggcttctcccgaagctggcacttaccctccatttttcagggcttaataagacagacaggcaaaatgtgtaacttatacatcgattttacgcgcaacgtagcttacatctgcacaacatagttatcaaattcactcggcctaatcgggtaaggcgggtgcgggtcgctgcgggtcaggaccagagtgggtccggggtatggtcccgtggacagggtcaatgcccaggtgcgatctgattgctgactgagcatcccgaggtctagatggataggtaggaacattactcggtataacctgagcacagggcttcctaggtgatgttttccaggtcagtgaccatcatctgaaaacttatctagtacaagtgagtagtaattaccctgtgtggtactcagtgagcaggagcggcagcaccctgatctgggaaatggcgatcgcggtcagaatttacatacaatgtcttcagtatccttgatatagcccagaagtgtattcactcttctaaaagactcaaacatctaccttgactttgtcccaccgtgaagtggcaacccttccatccttgatcacagccagaatgtgatcctcgacttgatccagaatagtgatatcctccaacggattttgcttcaaaatcaatagatctgcggcaaatccctcattgacctgacccaacatattttcctgcataagaagacgagcggcattgacagtagcactgcgcaaaatctgcaatggagttaaaaccgaattgcgcaccgagaactccttgctctgagcaaagtgcatcgggccaagaagatcagttccaaagcagacggtcacgcccgcatcgacagccatcttcagtgtctctaatcccttcttaagaacctcctcattcttagcagcgctgtcatcagacaggaatttcatctgctgaaacatgacatgcgtaatgagcgtcggggtcaagaaaacatccatctcagccatcatcttcgcggtctcgagatcaacaagatttccatgctcgataccgcgcactccgagcttgatagcctgctggatcgcctgcggtgtgtagctatgactcgtgacgtatgtgcctgcattccgcgcaacggtaacgatagccttgatctcttcgtccgagaattgcacatgttcaatacggtccgtgggactcgcgacaccgcccccgcccatgattttgataaaatccgctccctggcgcagctcctcgcgcgcatacttgtagcactccgctgggccgtcgacaaccctgctaatcccggagacggagccgccgcagcactgctgggagttatgggacccgcgcaagtcgccgtgtccaccggtttgggagagtgcgtgtccagcaatgaagacacgagggcccggaatcacaccgtccacgacggcttcttttatcgcgaggcctgcaccaccacagtcccggattgtcgtgaagccacggtctagcatggatttgagcagatatggctgtcgtaggagactgactgcgtcgctcatatcactgtaggcctgtagactggattcaccgggaacgactgcgatatggacatggcaatcgatcaggccgggacataggtattttccgtcgaggtcgattacattttcttcggggacgtcatctgtgatggtagttgagccgtctgtcacgatctgaatgatcttgccttctgcgattcggactgtagcatttgggatcaatttgccctcggctgggtcaacgatggttgcgttcacaaagaccaagtttctttgagagttgggtttccagggcttgataatccgggagatgtccatatttgcagtatggttttgctgattttcttttggggtgggtgtgtaaagaagtagctcacccactccaaatggaaaaaccgagcatttcaacagcccgccatccggcccggtcatgcacgttgtgttcgtaggtgatgatgatatgcgggtacttgtacccgcatattcccattcagtcgttgagtgccacagttctccacccaggctcattacttctgtattggcttaacactttaaaagccagtacataatgctttaataccctattaatgcattatcaaaaagcattaggtgccctttatagctgaccccgcctatcttctgctactagtagacttcctctataggtacgtgggggtttggcttgtgcattgattatatgcattagataccgggtatgtacctatgttgtacatagtcaaaaacaggcgtatcaatcatcgtctatcttggtttcttctttaggcactctcgactttgaaatgcgggtacaagtacccgcacggcaaatcactgacctatcacaatatatagtaccatggagtggtacaatatatatacatggtatttgacaacaatccctatctcactaggcaactatatccctgatgtagtacagtaacactgcagcataaagcaacaaagtatataatggcagtccggggagtccggggagaccggatatagaatccccatactgtctcagctatttatgaaccggttctgctgagttcattgattattagattctgtcatttacttgctcacattggatttggctgatctagctgctgcttggcgttctgattctcgccagaggcagatatgggtgggagtaatctagctagacgatactttctattacgtgctagctaactagttactgaagtagttactggagcagttgctcaagcagtttctcaagcagttgattaagcagttaataatgatatgacaaagggggcttgattttattattagtttacatacaaattgtaggtacctactgccttactattaccaaccatatggcagggaatatgcctaattgtgaaggcggggagaatgaaccagtaagaaaggggcttttcgcagcattcgaaattggaatcagtcgcttcgctctgcaacgactatctggaggccttaggtcgtggagatcactagtaagaaacatccaagatgccaccaaacattattcagattcatttcctcatattttctcatattttcaatatacccaaaaggttccccaatcaagccagcatctataaattcggacacgtttaaccaagcaactgctgtgcctctttatgcacagcttcggtttcggaatctgtctcttcttcagagtcatcatcttcttcctctgagccagattcttcttccgaatccgtctcctcttcctctgaatcagtttcaccttcttcagaatcagtttcagactctgtctcagtttcctcctcctcctcttgtagccactgatcaagggttttcttcccaactaggtctacaggcaaagccggtccgtttcggcttgggatggaagtgggcttgtgttcgcgaagtgctttatcaaggcggtcacctgcagtcatggcggtggagtcgctggatgtgtctggtttcacatcttcgatgcggaggctgggatcgggttcttggcccggctcaacccagtctgggagattcgtgtagcctcgaagtccgtggtaaccagcgtcagggccgacaacgagagtggcggagccgatgagcaggtccttgcgcgtctcggatgggctgggagcgtggggaactggctttggtgccaggagaaggagattggcaagttgggtggaagacggagtttccaggaggctcttgtagagacgcgcccggtcacgcaggtcgtaggatgtgtcgtaacgtgcaagaaggaggatataccgccataataacgtgatacggtcttcggttgcttcctctgtttccttctgttcagtgccgtcgtgttcttcacggctctcctctccctcttcgacccgctcagcatcttgcggttcctcgttcccattgtcagtccattcgttgtggaactcttgttgggatttggctggggcttcagggaatgacgacgatgcaggttgttctggctgctcctttggtgggttctgcaagagatggtgtaaatacaccttggcaccaagaagaacagtctgctgtttgacaatttccatctcgtctgcgaatcctttgatcaatatacggagcacatcaggcgcgatattgttctctgggtcaattccagcgaactcgccaaccagccagataatagtggctcgtgcgtctggatgggttgttgaacctaggtgcttgacgagctgaagaacagtctttttatgtgaagctggatcttgttggatcaagtgacgaataacagtcagtgactccgacacgaggttgccgtccggactagatatctggccgagaagaatccgtagacacatgcctgcggtacttgtgtccccttgcgcgcatcgcccaatggctcgtacactctctcgtaccagctccgggtctgtgtctttagagaagtgctctagttcgctgattatgacccccttccagtgttttccacaatgcgggaacaagatggttagcacctccagtttgaggcgccagatatgtggggggtcgttggcgtggacaaggaaatgggccgtgtatttcgcaaaaggcttaggcacccttagagcaacggcaacaatgttgtacagagcgatgagctgcatatcctgtggtgttcttaaaagagccacaaggggaccaactgctgatgaaatatattctgatggagcaaggtaaaggaagcaacggacaacgctgacaatgacggcagagtttctgctctgcagtagaaccttgcaggctcggagtagaagctcaagatcaggatccattaccgtaacttcgtactcttcaacatcattctgcgtctcctgttgttgcttttcatcgtcgtaaaatgcccccggggctgtgcgcttaaccgtctgagttcgttgagggaagcattttcgcgcatagaatgtcaacaagcgcaatgttgctagctggccccattcatccatatcgaccagcttcttgactaagctgcgatagtgcttgtgaattatgtcaatctcatccggacacagatctaagaatgccgcgactgcaggcccgacgacaaagtattgagaatcgcccaaaagtgtctcaagataccccatcagttgtggcagtgtgttcgggtccaatcgataacattttgggatagccaaagcggccgctttgcgcacgtgtggactcatatcaccacatcctctcttgatggccagcgacacaatctggctgatcaccggaacccggattcccgacatggtccgaagcgccattgttcgaacctgcgggcttgaatctgtcagcgatttctggatcgcattgatggacagtagtgccagatccggctctgcctctgcatgatgaaccaagtagatgtaaaccaatttcttgacttcgaggttggcgctggccacattcttgacaactgctgaaaagaaagtaagggatggttcggatcgatacatcaactagaacaggaaattgagtcagccattgcgttttccatagttcttgttcacgatcctcgtaccgagatgaccctccgcattccatccagaacttcccgctcatggcgactgtcaaggagcttcttgatgtgcgcggggctgtatgttcgcgaagtataatcggtgtttgagatccgattgatagcagcggactgggcagcctctaatgtgagctctcgggctatgcgcacagtgacgttccacggtcagtttaggccaaataggacggattgcaacccaatccgacatacctgtttccagcatcgaggatatcctggaaattgtttccatctttccagtttctgaatgcccagtccccaagggccttggctgagttggagggaatgggtgagaggtgaggggaggaaaggcggagcagctccgcggaagtgaagtggacgatgccgtaactcttcaccccgatctgcaacgttctgactactatttacacaccacttgattcattatctacgactaccatgaccatttgtgtttgacgggttatgagttgaagacgaaatgatccatctctcgttgatgacctcggaggggcaataagtgggagctgaacacagctatctgaaccaatgggtccaacatgcacggtcgctcactgcgagttggtctctgacctcctgcagcaactacttgaaggcaattcagatacgtaccttattgtctgcgcaaccaaagccgagttcctagttcaactcacagcagccatccgctcacaatgcgctgatccagacatggccgcgagccatggcctgctcacgaaaacaatcgggctgcttgcaagatccagcaaaatacgactgttattctgcccgagcttagagtctcttcgggcataccttgccattttcgatactgctgttggcgtagctaccgaggaccgatcgcttgcccatgatcgacaactcattgctgtccttgatatgatagctttgcatgtcacaacttcagagttctcggcacaggggctttcaagaacactcgcttctcttgttgaagcttcctccagggcggggatggatctccaggtttatgaatgcgtgaatgccctggacccttcaagtgctgttcgggggaaaatgctatgggatgtgagcgttcccttactgaacgggtcagttcgaatgcgatcggatcaaagtatctggagtggacggggcgtcaccgtaaaacgggttgccgaacgctggtttgaatttgaccagaactgggaaagaatggaaaacgcttaattctgatatcagagatgatattgtaacataataaaactcctgaatttgcactatccgggtatcctgtagctgaccgctgaactccgcacataaataacaactgattgatcatagagacttctccatctctgtcatgtacagcttgatatgtgactctaactttaggtactgatcgtgggctgactgaatctcggtctcaatgttctccttcaagtcaaccatctagaagagtgggttagcaatagttcatcacccacgacacagggtaagacgtaccttcttctctgtctgttcaatgcgaatacgcctccgctccatatcgcgctgcttctccgcacgctcctcgcggagctgtttttgcacatttcggagttcttccatgcgtgcctgcgcaagttcggctttctcctgtgcatttttctgaagtgcctcgatgcgctcgacccaacgggccagttgacgctgcaagagcttctcggtctgctcgacctcgcggacgctgttccccctgtccgaaatagcctctgcagttctagcagcacgagactcctcttcatcctctttttgcatctcagctgaaatgtcatcgagcaatttaacacatccctgcacatcattggaaaccacggtgaacgtatccgaagaggtctgcagtgcgcgtgctcgcctctccatcgcatcaatggaggccttttcgcgcatcagattctcggatagttcagccagtgaggactggaggctggccggagactcgagcacataaggccgcagtttctccgcttcttgtcgagaacggacggttcgttcggttttctcttccaattgctgctgccgccgagctctttccgtcttaactcgatcaagtgtttctgcgactcgcgactgctcccgacccagttccaatagccgcgccttaagcgcatcgtttcgggaaactttctctctcacattcgcttcattggattggagatcctgccgcatttccctcagccttaattccatctcctgattttccgccagaagttcgtctatgcgcgatttcgttttttctgtcttgttaaagtgctcgtcgatcacaggtgtttgcgattcccggaatcgaacaaagttaatcaagtacgagaatattttgacgagtcgttcatgcgtcggtttggtcaggtctgtgaaggtgaagtcgttgacaccgcactgttttgtactataggcattagcatactcttcggggcttttgtagctagtgatgagcagatacctccgccaatagctttcgcagcatcataaagaaacccatgaggttgcgagtgtcattgggaattatatcagggtagtcgccgcatagatcttctgcagctgcatgcattgcgggttccactgtctctcgagtcgtattcatgagcagttccgcgaaccattcgaacaccatctggatttgttgggcgtttggtttagccaggtcggcgagggtaaacggtataccgatatcgttgatacatcctgcgatctctttgtcgggctatttcatgttagtatcagacgaaagctccggcaaaaatcaagctcaccaagcgcatgagggcgtcattttcgtcctccttcttgcgaccccgaccgtggtgctggttgccttggaattgctggctcatacggctgttatatcccatggcggtagagttgcgcgacatgatagtctgagaacctatcaccaggcaaggggcttattatcgaagtggataggctaattgttgttgatcggggctgattgtttactcggagacaatcccgcacgacgcccgatcggggttagtgcctggaggggcattgtgcaaaccagacaaacatagaattcatgactctttctcttccttctacattgctttgttcccactcctacatcttcgacgctcaaacagcatggcttctactacttcagatgcggctgtagccgatacgaaaccattcgagtaagtaaaacgcgctccctcgaagcgctcgcacctgctcactgttccttcagcattgtcgcaacctacaatgaactcctccgctccgatgccgacctcactatgcctattgcggccattgaagctctggttcttcttctcacacagtcagcctcttcaacgatatcagagactttggatctactcgaaaaatccaccgcccacctgaaacgctccattcccaaccccatcggtctatctgccggaaccgatcttttccaacgatacctgatcaccacactacaacgccctgggcaactaggtcccgcgggcgatttcaaggccatccgcacacatctcttgtcaaacggacggctgtttatccgacgcgccaaggaaagccgagacaaaatcgcagcattcggccgtggcttcattcgcgatggcagcaccatccttacaaacggtggctcccgcgctgtcgcagcactattgcaaaaagccgcagatgaggagggtggccccgctgtgcggttccgtgttatctacgttctctcttcgatttcccaggattgcaagcagcccaatgaagaaccagagggtatggaaacagtccgtgctctgagagcgaagggtgtgccagtttcaacaattccagagtccgcggtggcatattccctcggcaaggctgatatggtcattgtgggtgcggagggcgtggttgagaatggaggcattgtgtctcgcatgggaacctaccagatcggtctcctcgccaaggctattgggaagccattctacgtggtagcagaaagccataagtttgttcgcctgtaccctcttggtcagtacgacctaccaattgagcagcaagttcttgagttcaagtcggaggaagaccttgaagaggagcgcaagcagcagtcctctgtcactaagacagacggagacacctcaattaagctacccctctgtgactcggttgatttcactcctcctcacttgatctctgcactgatcacagatagcggtgtcttgacgcctagtgctgttagtgaggaattgatcaaaatctggttctgaagaaaagacatgtgatagcaaagcctttctgctattaaattccccatatctcaaaaactttcattccgatgatatggtggggaataatttaatgtgacacctgcatctcatgcggccctcccatgtggaaggatcatctcaagcgagcaagatgggattttccttttcacacgtccaattcaatgtggatatctatcacattccttccagtgtgcagcacaaagataagctgcaggacgtgggcaaatcacacccctctctttcctgtcaatgaacaccttgacataaatggaagtggatatggaatggtttccagttgagggttttttttcttgacaaagggcttggttgaacgcaaaaaaaagttatcaacaaattttctcaagtcttttagacaaaggacagaattgtagtctggtctcctatggtatcaaacgtctctcaaaatcatacagtcatcatcatcaataatcatcaaagactctatgttgtagttgtagcggagccccttcgcaatctcatgcgttaaacatcatgtatggaaccctcggagggtgtaccttttatatggatgggttttttgtccgagcctcctggacgttaagatatccagcctcatatctcttcgcctctcggttcatcaaaaagacagtcgtaggaatagtcgtagatcataattcataattggccattcgagtctcccaaaggaatagctcaatccgcagccgagcatggaccgaattgtcacaagacaaaaattgaaccgaggcggtcattgtctcctaacctgcctatcacaccatggcaaggagctcaattggcaatgcggttgctgataacacaccattcctgtgtttgcatcccagcgaacgcatacagcagcaagtaaccaagagccacgaatatccacaaggctgccatgttggaaggatttcaatcagaaagtcggtgaaggtgaatgggatttttatgtgtgatagacgataaaggattcgaggggtatcagacgaccacgacgacggggtcaggtcaatggtgccagcgtttggccagtggagttattgtgtgctcgggatgtatgctttatagaggtaaggaggtttatgagtaatgtcaggtgctctgttagaagacataggaaatagagagatagagggacttttctctgggatctcatgctctctagacattttaaacacgaccagaccgacaattgatagattctagagtgtttttctatcactgacacacttccttccggtttcttccatccaatacgaatgcgagctgggcagtctgtctcgtccattaagattccttgtcggagaaacagatgcggggttcttgagaagattattacttcacacgtctcgagatatgaaacagtctagatttctgtatgtggcatgccgggaattccctttctgagtcatagatcacatatccatcacggatgttgggtattaagacggacgttggcatattccgccaattagggaccggggtatgatcaattggaaattattgggaggttcaatcagtcattagttgtgcgccttgcatccccaagtacatcgtgcatttctaccatagttctgcgaatactatcaagtgatatagaactgcgcccaacacctctcacgcgggcctacatgcatcctccaggaacattaatacggaaattatcgataggcaacttggagggaaccttgagccatatcacagtacaatttctattacaatggtgtatgtggtctcaaatatatatcgtggcctcgtaggtgatactatatgcatgtatttttgtcaaagccctgaatcctgaaacagctatggatcaccatcagactctgcataatcatcgtgtcacttgatatcgagcaaagatagggtctaagccgccctgatcgccaagaacgcctagaacaaccggaagtttcaagcggccacgtcgggttttggagggtgcagctgcatattcaccaaacgccctgaatcctgagtgctctacaagaaagagaatatcgagtcatcccaaggttgtcaacctcgtagagatcaaagaagatcatcaaagacgaaaatatctcatcatgccccacaagatccaaccccgctatccggtccctaaccaaaccagcaccaacctcacctccacccaaaccagagaccccaagggcccaacaccgaaagcatactagtctactcaaacaaactatacctgcatctacgcgtgagatcccaacggccatccgacaggtgccacccccgctcctcttcaacgctataccacctaccttacccgcttgccaacacccaaaagcaaaatcatggatgcccaatcgcccacgacaggctcccggcctaaccagaagttccacctaggatccgaaacccaaggtaccggtccgcagtcaccatccgatacccactgtcatagcggctggtctatcagacgccttctgggtcgacgtgggagccgcaactacagcgttctggagcgggagccaaaccggctgaggaagcgcatgagcaactgagtttcttttcacggatgaagggaccgtatcggttggcgatggtgatcaattctggtatcggtccgcgcgcatccgcggaacagaggaggatatccataagccacttttgttgttggatgtctcatcgagtttttggccgtttatttttcctcccggggtcgcatggaatgcgggtctgcatcttgtattttcggcgtttggttagttagcattgggcgggtaggggcatttttttgggaggagtctgtctcatctatcttttttttttttggattgatctaataattggacgattatactccgtaatgcgaagtcattggttgccatctgagttttcctggccgacttcggtatcttgcggtggcagttgccttcgtggcgaattctcaatggcttgaggagttgccacgactttttcccgggtattaactttggaagggagatgatcgttttaaagagggcaatgtcgagaaacctctacattgtccggagtagagggtaggtactgaagtggtgaataataagatcgggaatgagatcttccaaatgcttataagcttacgttttagcgaaaaccaaaataaaataccaggatttgatggcggctgtttgctccttgcagatttagtggctgtcctgctcaacccgattctgggcgttgtctctgccgttcttggcgtctacgaccaaacagtattctccgctgtcagatcagactgtcagatcagacctaactgagcggttgaccgttgtgatcaaaatgcaggaaccacggtggaacaatctgagaccggaagtggagtggtattatattgtaaaatgaaaggtatggagtatctgtataacatagcgataaggtggattccaacagtatggagtatacggagtataatatacatacaacatagatagcgatatagaatagtaccgagatatagaatagagggtaatataagcaaggaggagctctagacaacgccctggatctaatcagaaccaccttgaattgaaaccaaataatagcgttgacaccttgcaacccgctggattctcaatggatataattagcatctccgtattcgtacgtcgcactggtttgctagatgtctttgaacgtcgatgatattgaatagaaccgagggagagattgaaagacaatgtaactataaccattagaaatagaattagtagtaatcaaatgtaatcctatagaaggaactaagacccccataaatgaaactcgccgatcatttccgtattcacgatacacgatagatttccccttacaatactactacatacatatccggtactatttacatataactagtccctgcaggtgctcaccaatagtcttgaaatgggtcgagaaacccctcccaagccgacgatttcataggtccgaatgggtcaaagtgcgtaagatcgactccattcccgcgtgtcaaaccaacgaaagggctaccgcggactcagttgggctccaccgggcgtttaaacggctggctttcccgcgtgagagggcacgaggggttagcatgcattgggctttggttgtacagggtcaagggccgatattccactcatttccgagcttgccgtatagaagatcgatttagacttggatgtccaatattgcagaggatccccccataatgtacttaaagggatgcatgtatttataacactgcgtcattctggaacccacacggagtggatatcccttctcccccacaggtcaactgccaatttccaaaataaatctagacttcgtgtgaccagagactttttaacgagattgtttacaccctggggaccaaggtaccaggtacccgtgcaactatagaaccaagcccgaagagaagatgtatagaaggtgtatagaacagatcatcgcaggcaaatataaaagaaaaaaaaaagcaaatgccaagtcacttgtttttcaggtaaaaaaacaaaaacaaggccctttttctgagttccctttggccctttgggctcgtattttcttttttttctgcctttctcaattttcatttcatttcatttcctttctccttcctctttctctttctctctctttccctctcgttgaacactcaacttctttcctttcccccttcataccccccatggcgcctgtggcatcgcactgactcccagtcattttactcgactctcctttccaccccccatgagtttagttagactgtcgcgccaccgaaccgataacgataactaatcccacttgtccctgggcaagtgcccccaaagtgccatggcgatatggccctttaatcgcaagagcaagcggcacaccatccaagtgaccggtgccgaagctgctgaccttcgctccgcctttgctgatccgatgatggagcctaccctgggccgcaaaccatccaaacgccatagcaaccgcacgacacggacggatgctgcagacagccggcgcagctcggccctcgtgccgtcgaatcgacctatctcatcgttagaccgccctgcttccattgccgatcatccacggaacgcgccacgcgaccctgcgatctcgagaacagcttcgctgctgaggcggaagccaagccaaaatgcaaatgcaaatgtcccgaataagctacgacggaagctgagcaagcggaaggcaaatgagatcatgcgcgagcgtgagattcgtatgctctcgtcgacccctcccatcgatattccccatcgtccgactcttagcagcggggaccatgtactggaaagtcgccgccgaaaggcaaatggtagacgtgccgaccggtacatgtctgacatcagcctcagcatccgtgactccgcctcctctaggtctgacatctctgacccatacacctataaggtcaacgcttttgctgccctgactccacgccctgttgttcgttacgtcgaagcccctcgcctccaacccgacagaagtaccaacccgtctgcttccagccgacatgacaaagagaggctccaggccctgaacatgtccgaggaagatttctactattccaaacgacgagtaaatgaactcgctgattcattagatgctggggctttgagagaattgcttgaccgggaccgtcgccgccgggagaagaagcaggtcgtcgaccaggaaagacttcgacgtaagctgcaggagagggctgatgctcagcaagcggaggaacgaagactccaggccgctgttgaggccgctaccgaggccgaaattgctcatcccgagcctttcgtcgctgaggtcactgaacccgaggacgttctcccgaacgaggaaaccaccgcccctcaagttgataaaccgacggtcatcgcaccggagaatgaatcgtggctgctgggggcttccaagagcagtgagcacaccggacgcgaatcgcgggaaagttctcgcgtagttgacgatagttctattcgtgaacggagattggttcagcgtcctagtttcgccatgtcacatgacatcaccatgtcccgaactactctttccccatctcattcatcaattcgccatgggctcaattccccgagccattcacaagtcggtggacccggctccacatcggacgtctcaaggggggttgattcagaacgtcgactttccgacaccagcggccgccgggggaataccattacttcgctgttcagacgtggttcttctcgtctcaagcggacatacaaggagcgattccacgacactacccctgaagtttccaacgcctcgcatgaatctttctacaagattcagacccaatcatcccctcctcagccctcggtcatccctccgagaattctaatgcccactggaaccgtgaagcgctctcaatccaagttcactgaacacttcggcgatgaaccactgtcgcctcctgactcgcgcctacagtcgccagatatcccggaggaagtgctagagtcctctctcgagaatgacgcgactttcctgcgtgaaccaagccctagtcccggtgtggacattaaaaacccgaaccgaagtcatcatcggtcgtgggcttcagatagtatggacctcgaggccgataatgtgccactttcccaatctctagcttcaattgactccgagggatcttggatgtcaggccagtttttccgtcgcatgtcacaaaagcccagcagtcctgttcgatccaatttgacctcatttggccgagactcggtagaggtcccggcagatgcttccgaagaagttgaatcactggatgagtcccaccgtcttagcacaaatatccttcgcgatccagagttcgaaccggaagcctctgacagtccggcaaacattgtcgctgaaaaatggcacagtgaggtcggccgccgccctgttctagtgaacccagtggtccgtcccaagtctacacaaggactgctcagagggttctcttcattgacccccatctctgcagaggaagattacattgtggaagagacaactccttccgggttgcagcggattcccagcgaggaactcaggattggttatgccgaatagactgagtattagtgatcaccatcgccatttaacagcaggatctaccatttatcattacatcatctgtgtcttgtgtcatggcgtgttagacgggtaccactatgcccatcgactattgccatgactcagatgcagtctgccagaggtcgtttgaaccttccctttgtacgctcttttgtcactttcctttgtcaaaatatccatccgtgagccttggattcatcctctggccatctgtacgattctgatatccccatcgccttgtatccatttattgcccttgcgagttcgtcattctcattcgatttgttgatacccctcgtcgccccgtgttttatctttaccatatgcataaattcttattccttcctattctttctgtcgaatacataagctgataaatctttattccccctcaagcgcttttcttcgttgcacatagttggccgcttctggcccttttctttcatcgctgatattccgacattcttttgggaatctactgatttgaggatcaagcagtgtttcttatgttgatgaaaatggtattctcgaggttttccttatgtatttctatcacggtccacaggcctttgtccatgagaagaataggattgagcctattttggtctatagcgcccttgaagtctctttaattctcatttttcaggaataaaatatatgagttatgtctctccgttctttttgggtcccagtaagcaacatcacctaagaaccgacaacctgcttcgcgtgggtatgtaggtataatttttgtagttgtgcatatgcagtgtgtaattagttgcaggcccggaaatgctgacagttccagactccatcttattcgtaagcagctcgaggtcaggagcacgtcatcccctatcagcttcacttctcttggatcccagcggcatcgatatctgcaggtacaagagaatacaacgaaaagtactgacaaatcccactatggtaagtctcaattgggatcttctcaacccttgaatcatcccagtcaaccccccagcaagctccagagacttccggacctccaggacccccggggccagctccgatttattattcagcgcggccttacctaatcgcctctgctgggaacgtcatggccctataaaaacccagcgcccctcattctacccctccaatcgaaatacttatatccactccagttcaagccttcatctcttcgttctacccccagaaccatctccggactttcttcgctactgaatcgatcgattcccgtccagcgcaccgctttccgacccttctcttcaacacctatcccacgcttcacgccttcttctctcaaaatgggtgtcactgctatcaccacgtaagtgcccagcttgactctcatacatacccgtggatcctggaaatatgttctacgcattcatcctggtcctttccatttcgcaaagtatgaaaacaccctagttaacactcctccttcttctccagtgccgaggagtacaagaccaaggtcactgatgccaccggcctcgttgtcgtcgacttccacgccacctggtgcggtccctgcaaggccatcgctcctaccctcgagaagctcagcgatgcccacaccaacgtcaagttctacaaggtcgacgtcgatgacctcgccgaggttgctgctgccaacgctgtctctgccatgcctaccttccgcttctacaagaatggtgaactcaatcaggaggtcaagggtgctaacccctccgccatccaggctggcctcaaggctatccttgcatagtttcggaaattgagattcattcttgttcatatcattgatctatgatcttttttttttttggagggttgggtgaattaattgaatcctgaatacgtaccgttccacaaaagtctgtgtctatgatgtaggctattcgtttgctttttcttctcaatcggttgtttgactttgcttggaagctaggtcggctatgcactgtgctttacatggtaaatatatgtacgtaattgaagaaaagagctacctggaacttgacttttgaattagaaaaaagaaagtgtctgtcctacagcttgcatgcagcttgcatgcagcttgacaatcaacccgcagtgaaattccccgcagtttctctatataacatcattggtgtttatatatgctgatcacttgagtccgaccacggtagcgtttcctccatttccatttcaatatcaaagtctgattggttccagattttgacatttatagatatatttaagacaaaaatagcaggctgcttatactgcattgtcctatttacttgttttgtttttgtggttctcaagttttataggtagacggtagaaaaagccggaaaaatgcataaattatgcaaacagaatttctgtgtacccaaatagcgtaagtcaaatgaatgtggatttgggattccggaacatccatctctgtactccgtaaatgagtgaggatatactaggtgtataacaagtttacaaatatgacaaacagctatagaaaaatggtcagtgtgtgaaagaaaaaccaagtttgaacttgaactgcatggcgcagatgcaaacaaccgagagaaggagttgtatctgtaggataggacgacaaacaattcaatggctgtctatataaagagtggttgtagcttttccatcatctccctttccatcatccatgtccatccacctcctgcttccttcaagccatgtcatcaaagtcttcaagtacggcgaccatggtcagtgagatgagtgacgaagatgagcgcccctcggaggcgtttgaatcggagaacttgtcataccgcaattactacccctcagaacatgatcagaccttcaatactattcaagagtatgcttcttcagtcatcaatttctgcgcatcgtcctcacgaccgatggacctcacattcacctccagggttgcgaagcaccttcagagaaactcggatttgtttgtgatgattgagtactacgatgaatgcgaccctctcggtactcttttcttagagtcatctcatcgagatatggcccaccatcgatgcgccaagctgggaatcggcatgctgaaggagttccagcattacgaaattgaggcaatccagtgggctttgaactgggctttcaacagagccggcctacatcgggtggagatgaatattccatcgtggaatatgcgactgggcaaggtgtgcgatgaggttgggtttcagatagagggaaaaaggcgggaatgttttttcaaggatggcgagtggcatgacgaagtgaacatgtccatgttgaagaaggactgggtgcaactccgggcctagacgaagaggtcgccatactgaaagtgcggtggtacaatggatacaatgcaggatgccttctatgattcaatgacaagtctgacctcgattcaattttgacttttctcatcaagtaatttcagtaagagtaagcgagagatagtttaaagagagaacgttgaagagacagaactgatgtataccaaatcctgcataggcggcttaacgtctagctatccccgaagccactataaagtcactgtgcacaaccacgacagtttctattacctatcatatttatgcatcatagccacgcgattgacaactgacagcaaccgttcgtgacttcggtccatttgcctcgatggagaatagtagatccatcacacccactgagcatgtctggagtaccaaggttgccatttagaacctatccactacatataagaaagcgggcaaagaggcgttcgacagtcaaagagtgtccaaccgagccgacgcggaaagcagatcgatcagatatttttggctgtgtttgcataaacctgctttgaccttggttcctatgattcatcgagggaaacggaaagaaagatacgccttcaatccgggaattaatttactttgtatatgcacatcttcaggaaggtgggactgcaggcccactctttttttaatctccttttgatctcttttcctgttcggatttcgccgaggcaaattttcttgtgttttaattggctgctagtcctgctatgatgcctttcatacaatatactttgaatttgcaagccgtgcgatccaggggcacatccgatcgccggcttgctcttattttgcttctggtttgagggttctcggtggcgttcccattgtccaaggaggctaatgtgatcgatcaatatctttaatatgttccgacgaacggtcgactatgtacggagtaccgaccgagcctggagtatgtatatcacaatatttaagagaggtccaaatgaacatcacagtgggccccgctcttctcacatctggcagctgaggtgcagctgaattcgcttattagctcggtccacggttccaacaattaatctaaatggaagctcaaaccgcagtgcctgggtaattctacggagcagtaaatctagtttccatggttgatacaaccccattatcggagttatatcaaacccaggcacggaaaagacatcctgtagataaataaagactaagatccgatgccattggcgttgtattagggctccgatacgctctgaagccaccccacatagctctttatccatacagatccgatctagatctgcccaaagcgaatcaacacgggaccaaggcatcggctgcaataccacatccaccaaatctaaagcgggctttgcgaccttgggatctaatttattagcatgaacttattctactaaaatcaggcctcggcattccctttctggattttttgctttgttttggtgtatgccacgcgagttgtgggtttaggataggtttaggatattacttgcaggccaatgaccctgtcggtggagatcacgtctagatcggacggggctcgatcgtggtacacgtcagttcatttgttaccgtggactagaggggcgcttgggatggctagtctaccctggtctaccctgatgttataagatgtttacctcgagccctgttctactgatttggactttgtgttatttgataacttttgttttgctctccacactgatactaggaagcgatttccatgtcgtcttgttgatattgattaatacagtcgcttccgactatcttaccctaccctccaactatacgtgctacttgccaatgtgccaataacgaaagaccaacacttattctctttctttcacaatgtcgacgacagacgataaaccggtcgtgcttgtcacgtacctggcggggtacatagttctttcctatgtgatcagcgcaatgggatgtgcaaccacactggagctgctccaccggcggacatcgaggtccggtctatacaattggtatgcccaaaaactctaccctaccaactcctgcacttgaacatgtaactaaccaaggaaaattaaaaggtaccttctcctaacctcgtcgatcacaatgggtggcattggaatttggtgtatgcacttcatcggcaaccgcgctatcgtcctgggcgacggccaggcagacgtgcaagtcttatataacgtggcttttacgggtacctcattcgtgctccccgtggtagtactgctatttgcattctacgctgtgggcgtcgaagagaaggccggctatcttcgcatcctcatcggaggcttgctcactggtagctctgtctgcggtatgcactacatcggtcaactcggaatctcgaactatagatgctcctatcacgtcgccaatgtcgtgggctcggcgatcattgctattttctccagtactgctgccctaggcatcttcttccgctggagggctacctggactgatagctggtggagacgaggaatctgtgcttgcttattggcggttgccgtctctggcatgcattggaccgcggccgttggaactgtctacaaggaccacaaccgcatggtcatgaagggaacccagttgtcgaggagtcaggttgtcattgtctgcactgttctggtatgcttgcgattgctttgaagatatgggggattggaaactgacagctctctaggcctgtgttgcatgtgtagtgttgtcgatgtgcgctgttatcgctgggcgaaatcgcagaaagtcgacgactcgtgcccatcagcttgtccttgcctgtgcctactttgatcccactggacgaatcatggttacaacgcaggctctgcttcctacgagaaagattgttgatcattatatcggacgggtatgtccctgagccaccggatacagcagaagtcttgactaacgaattacgaactagacattcaaagatgacgacctcacccggactcaccctacattcctgtgggcatttagggcaactcgaaattggcccgttgtgaaagatctagtacccttcatgcgaaaccgccttgattccgaagaaagtgccattgagaaacacatgctatcgcgcggagtgtttatggacaaggatacggagttgcaaactgattttgataccttgttcaagcaactcttctgtgtcacagcccaagagctctcggatgaactgaatctgcctctccaggacctaggaacactctacgacgatgttctctctactgctatccccgtctcccgactttctcgagccatgggccgctcttcgctccgcactggcaagggtcaattgatgttcactgttcgccagctacaaaaacatgaagcagcacgcttgaggtcacagggattccgattcgcaaccatcgagcatgtcaccggaatgctttcccgacgcatccatgttcccgaagcaaacctagccaactccctccgcgatatgcgagactacgcaagctcgaatcgtggctttgacgagggagtacacctcatatccttcatgatgcgcccaacaatccacgatcacttcgagatcctcaccgcaaagggtgtcggcaaccccctcccatccgcaaccctccccataaaacacctcgaaatccaccatctagaactcatatcccacatggaaggctggtccatggacacatgcatgcgatacctccagtcagccagcgcagggcaagccttccccaacctggacgacttccgcgccgagttcatccaggccatcatttctctctcgaaaaccatcccagaagacctgcgcgcagcagcgcaactttccgctcgcccattatcagcgccctgccgcagcagatcccccaaccccgaaatagcagtacagaaaacctgcaccctcataaccttctgcgtcgtcggcacgctcgaaactcaagtctccaacccagactacaccttcacacccttccgtctcttccgcgtccagcaacagataaacgaagccctcaccgaccgtgacgatttcgcccgcgaactaggcgacgaactcttctgcacagacgtgcgctcgggatcgaccaccagcgagagcccttccacggctaaactggccatcttgcgtctgtggccgtcacgcaagcgctcggcgaccttgagctcgcaatactcccaggagtcgtttgcggatcctactgcgactgcgttgcgggatatcactgttcgcagggaggttcgcgttgattttacccacctccatgagaaatcaaatcataatgtcagtgcccgggaaacaaaggtggttgttaccggtggtggtgagaatgcgcctacgacttatgtcgatgagttgtatagtctttgctatgcaccgggtatccggatgagacctgatgcgtcgttgcaaaatatttcgcgtggatcgactgcatgctgatgacttttctttatggtttgatttcttttgcgttatggctggcgtgagttggaatgtatacgggaattgggactggtcttttatgatttgttatgtctatgcttttcgtgggatggtttaggattgtatataattttctctttctgacgagtatatagatgatatcaatacaaacgcatgcatgtttcatgtgtaatttcagcttttccaaagtcttattatcaataaacagccaaaatagtatttgtcaacacatgagatgaactctagtaggtcacagagaaaaagcagaatatcgtcacacatcaagaatagactcgttaaccaatacatgcaagagatgtcatgtactcattacttcgcacctgccgagagcgagtcaggaacaaatgcagtctgaaaagaagcactggccaatcaattgaagatcctccaatccaatgcccatacactatagagcacagatcccacggatcaggcatcaattagcattaggatcctcgcgctccaagaacgaaggatctgcctcaatgcggcgctcgaacttcgcccaccaattctggaagctcttcagcggcacgacatcctgaccattttcattctccgcaaagctagcgaggaaattaaacgcgttcccaataatgcgctgcgccagcagcttcgtcgagatctgcttctgcgccggagattgcgaaaccaacgccatagacgttctacccgatgggcgctccgattccagggaggcaagctgcggcgcgatattctgcgcttcttcgatcgaaatgcccagtgtcatgacgcccgttacagcagtgtcctcgtcgagcatgtcatcttcttcctcggcttccgagcggcggggagcacgaccttgtggacgcacggtgaagatgcctgagggcttttcgtttgccaatgcgcccacgaagcggaagtcggagggttcgccggtggtcgggtctgggagttgggcgtagattgcggcgccggtgtttggtgggagggttgctcctggtagcataaagacaactatgtcgctgagagatgcactgattgggattgtgaaggcaaatttggttgcttgcccgttcaaatggctgtctactgcaatgatgtctgttagacacgggcggcctgggaccacgacggagaacatgatgtgtggtggtagggtttggacgagctggaggcagcttgagtagctggtaaagcggaaattggcaaggtgaactgcgatcaatattacttccgttcttgaagcttctttaagcttctcgatgatgaaatgacataagaggggctgcccttatcggccggtcgataagggtttggcttggctaaacaaaggtctggttctcagtatatcgaccttcgacttttactttgccatcgggttcagcttctgtctttagaagtcattatgggcaaatccaatttagacctggtcggcgaatgcgataagtaaagctgtcccaactcggtttctctcaattcgcgttttctcttacaccccaccccgcagcttcccctactacgaggatgatcgcgacgtctacacggagaacctgaagaactatcatgcattcaaagtctccggatacgactgtacactcggttatattctcaatgcagtcgttgagaaatttccctggtcggaaaagagctgggccattgactcgactgcgcagaccgtgacgctagtgacaccggagggagccaccccggcacaccggagcaagctcgtcgcagcagacatagccgaagccgtgaaacaaaaaaagttcgaagtgctgcaaggctggcgcaacgagacctacgcagtctacggcccgggcggagaattcctactcgagatggagcgcgctgcgaccccactcttcggcatcgtatcctacggcgcccatcttacgggctacgttcaggatgaatccggtatcaagatctgggtcccacgccgcgcaaagaacaagcagacctacccaagcctccttgataacaccgtcgccggcggtatgtgcaccggcgagacgccgtttgagtgtatagtccgcgaagctatggaagaggcatccttgcccgagtcggtggtgcgcgctgcgactgtctccgtgggctgtgttacgtactcacatgtacgggatgtacgagcgggcggcgagacgggcctcattcagcctgagattgaatatgtatacgagctcaggcttgaccctgaaactaccccgaaacctggggataatgaggtcgaggaattcaagttgttgtcgattccggaggtgcaggcggctttggcgcgcggcgagttcaagcccaattgtgctaatatcatgattgatttctttgtgaggcatgggctgctgacgccagagaatgagccggatttcttgcagattgttgctagattgcatcgtcgcttagaatacccgactgcttcgcattgcgcaaggtagattatttgtttgattgcttgagacatgtgtcagataaggcgaactaagatatatcaaatcaatttcaatcgtgtgggttccttccgcatttgcacagccaaggcagttatttgcaagactatgaaatgattcgatagaagcatggtcacaaccgcactgacatcgactgttgtaagacgaagaagatgaaaatgagccgccaaagtcagatctgttgggtttttgagtcctgatcgcaaagccaggaaagggataggcactgtgcggctgccagaaattacagctctatgcagactcagcccgccaggagacgcattttcattatcgaacggtcaatgttcatctcgtcgatcccatgaaaatcatgattgttatgataatctattggtattcccaaatcaaaatgcaaagaacgcctgcgctgcaccccataagaacgatatgaacatcggtccggcttaaatacaccgacttttcccccattcgggctttgcctcaagatcaatccaagatccatctcatcctatgccaaggtcgtaagcaaaaaaagagagttccaacaatcgtaagcttatttcttaagcagcaagtacacgtgatcgattctcaacggagcaagctttttgtaaggtccttccaggtagagcagaagacctccaaaggacacaaagacagccctagaaatgtagacgttagtttccgcaagagccaacacaccagtaacgaaactcacatggtatccttagtggcaccctcctcgaagcggtacaccttgccgtggcaaacataatcgtagtcatccgctagggtctgatcacccatgctgacctccctccagctggcgcgggtgtcctccttgccgtcaagagagagagtcgaggccagagcgagggacagcgactcgccgaccgcgcatgggtacaactcagtgttcacatccagggtaaaggtgagggaagcatcgttcgagttgcaggtaagacgggagacgcggtcatacttctgggcgttgatcgaggtgatcgtgaaggtgtcttcgaagaggagcgggtcggacatgatgaaggttgcgaccgctgtgttttcggtctatggatggggtttttggtagagcgggttatgcgcagattatcgcacacaaattatcgtaggttcaaaaggccacaatggctagttggtggtccaagagtggtgaagagaagagttggagtcggagatggagaggttgatcggagaattgaagctttttttttctgccgccatttggtcccgccgataacgatttcgttggtttgacatcagctcgttatagctctactagatttcttccctagattgaacttatccgccatgtcctttcgcaagcgaaacataagtctttctcctggagttgaccgcaacgctgttcccaatgctactgcacaccccgctgcgccagttagcacgccaggcattcgcccctcccccgatgatggacggccaacaacatcgacagggactcgctctctagataatcttcttgcaggccatgcagggcttccaatggggaaaattttgttggttgaagaaaacggaactacggattttgcgggcgcattgctgcgttactatgcggctgagggcgtaatccaagagcagaaggttcatgtgattggagtgccagaacaatggggccgaagcttgcctggtctgatcggctcggtggagtccctggacgagaagagatccgacaggcgcaaggatgatcgtatgaaaattgcatggcgatacgagcgattgggcgagtttggagcagtcgctggttcgcgggatggtgagtattggaacaaaacattgcttctagcttcaatatgctgatcaatatagcccctaataatcacggggaacaagatgcagcagcaaaagaagcacccgctttctgtcatgccttcgatctcacgaaacgtctcacccatccgtctatcacaaacatgtccttcatcccacttatgccctcaagagagtcaccattcctcgctatccttaaacgactccagaccgaaatcacgtccagcgccaatacaatccaccgtatcgtcattccttctctgctcaaccccacaatttacccgccgaacgcctgccaacccgaacatgtactccagttcttccacgccctaaaggcgctgatgagtgcgcacggcacccgcgtgaccgcaatgatcaccatgcctctgtctctctacccccgctcatccgggctggttcgctggatcgaactactcagcgatggcgtcattgagctctgtcccttcccgcactctgcggatgccatggctacctcgggagcggcgacctcacaagaagagccaccgcagggtatgcttaagacacatcgtcttccagtattgcatgagcgtgggggtggaagtgaccagaatgttggacaggattgggcgtttattctgagccgccggcgattcgagattaaaccgttcagtctgccaccggcggaaggagacacagaagcgcaagatgcgtcggctccaggcggaatgcccaagaaatctgatctcgaattctgagactctttatgattggtgtgattccctagactcaatcgtcctcctcgaagcgtcgttgggtccctggttctgctagcatatcgtccatctcgatctgctcggacatagcaggaccagagttggccattgtgcggagatagctcgctccatatccgtccaatactggtcgcacggaacggaggcgattccccaagcaggatgaagctgcaagccatgctgttcgtgttagtaatgcgatcgggagtaagaaaggatgctgcgcgatactgaccaacaaagagtatcaggggtgcaaagaataccaggaatatcagcagtaaaaaacccatgatgccttagtatagaacaaaatactcaacgaatgccaatgaagatgatgataaacacgacagcgatgctcagcagttcgcttgccaagatgactattcctaaagtggactagtgtgtaaactgggcttttccttttctttttttttttgggcgttcgtttcttctctccttcaatcaaccctggctttgctggtcaaacccaaagacaactccgggagtttgatcatgttctcgacactttgttaattctctaatggtaagcttcatcctcgtctctcccacacccccaactcgcatgattatttaactacaatctgtcaatcccctgaagctctttgatacgtcactgagtgcttgctgagaaacgtactggaaaatgaatcgcgataccccaatttaccttgctggcaacctgtatctttacatattggacaagcgctaactgtccttgccacagaatcattgaaaatttttccacaaatctcaaatcagaaagaaaaaaatatggatttccaaccagaccttcctatcccgatctcctatgtatccggtagatacctgttgttctcaattgacgccgtgacatacctgcgacgtgagcatcacatatgcggtgtgctcattgggacgctgcctcagatccctcagcagaatgtcttcctgggtctccctctgcagctgatgccagaagaggcacggctcttagtggataagggtgtagcttgcatcgtagacgaagccaaggcacacgacggcatgaacaccctcttagaagaggatcgcagacggtacctccgcgacctcgaatctcaaggccagcatatctcgcgcatccaattggatcgcaaagagcgcaaccgggagcagacattgaaaaaattagaagaaaagaaagcaaaggcgaaggctaaagccagtgctgctgccgcccagacacctacggttcctgaggtcacttccaccccgtcgccgaagaacgctgctatcgttgacctcttcaacgcagaggatcgcccatcgtctccatcgaccgcctcgacgagcacacttcctcagagcgcaacggtcattaccccggcaacatcttacccgccccttctcacgcctccaccatcgagccatcttccagcacccgcggtgccaccctcctatcctctcttcgcccacctccactccaagggatactttctctcccccggcctgcgcttcgggtgccagtacacggcttacccgggtgatccgttgcgcttccactcgcacttcctcgtggtgtcctacgactgggaccaacatattgatctgatggatctcgttgtcggcggcagattgggcactggtgtgaagaagggcttcttgatcggcggagcacagaaaggaatcgatgaggtggattcggaggctgatcgtgtgggtactgtgcgggctttcagtcttgaatgggctggaatgtgagggatgaaggacgtgaagggtttcatacccttcatttgtttttatttcccatctaccaggcttgtgggtttggtttttccttgcaaggattccatggctcatgcgccacgctgccgggtcgtccttgcctgtccccgggtacctggaaccaggtgcccgaatttctactgtacctggtctcattgagcccagggaagaaatacgtctattggcgatttggaccatcaccgagcataaagatacagatggtatcctcactccaaaggaggtctaccatgactccgccttctagcgactcaggtcggaggcttggaaaggcaaacagtacgtggttaagaagggtcgtcaagtctctggtcaaaccatacgttgcccgactcaaattagcatgtcatatgatcacgatcacaaaaaaatgttcatcgaatgacgtctacactttacagtgattttctggtaaatctgtagtatcatgtcacagttatgaatgatatgcttcgcctgttgaagacaactagccaacccatcggggataaagggtattccaccatgaccaaaatcattccaattgaccgtcttttcgggtcacttcatagattcgagctgaaacctcgtgttcggtgctctttcctttgtctgaattatgtatgcctttccgcgtttgggtgccacattgcgcactgtaatatcatgcagtagacatgatgaaagaagaacgagtctaacttcatagaacaccggcatgcctcctcagattatgactgtgaagctcgaatctcaaagactctcagcagtatcagcttttatggcaggagcgcacctgcgccgctcgagtccgcttcacagctaagcagtcaattctgtcggtagtaaattgggaagaaccgtagaatggccaccgtctcaaatgtaatcgatgttcctccacttgaatttcttattggctctgtccacaggacgattctcgaactggtttccatgcagctcgaaaaccaacggcataggagcttttacatcagactgagtctgctgatccttcgcgccctcggacggcgttggcacaggcactgtgaaccggaagatagtgtgctccttcggtatagctgtagaaacaaaacaaagtcagcatgatcccagtatcgcacctcccactccaaaaatcaaactcactcttcatctcgtccttttcggtgacaatgacgaacgtaaacttcgtatcccgcaccacaatccccttagcaccaaccctcccagtacatcgactcctgacaacctcgaccgcagccccatggtaatccgcactgacaagcttgcttccatgagacgccggcgaaacatggccatgtggtccagccttcacatccaggatctcctgcatatacccgacccacagctcatgtaggcccttgaagatggcgtatttgcattcttccttgggtaggttgtacagtcctgacttgcgcttttcgcgcgctgacagcggttgtggcttctggtgtcggagaaagtattctttcttgcgtagacgctcgagacgacgccgggagcggttatcggatgctgagggggaggttgcgcggaggaagagtggtttctgtttgatgcgctcggtgaattgttgcgttgcgctgtctggggagtgggcgcgtgagagaagggtgtgcgcgatgtgggtcttgggggctggggaagaagccattttgtgttatcttggatgtgtggctccaggggatgcgaaggtgtggttgttggaggttggagaaaaattatttgatgtcacacaccgataagataacgcaggtcatgtatagttcgaaggtatggaaggtataaacaaccactttattcacattattagaatgattcaagtctattttctataagattatcctcggatattggaatatttcagtgattaggtttcggacgtccctcggctcattgatgcttccccgcataaatcatctttgaggtgatatatatctcacgcattaaaatgacacaatacctgcaacaacctattgagataattattgtctaatattgactccttcaaatctgcttacatcaacatgcagtctcagatcgatcaaaaggacatccccagcaacttcccggggattccagccttcccagatgacgtctctacagcaccccttcttcgactatcgtcgggaaagctgttagcaggtgaccatactgagcaagagagactgtttcaagcatctacagacattgggttcttttatctcgatttatcagactcaaagagaggcttatcactcctcggcgatgcagacaatctgttccaagttggcaagagactatttgagctgagtctcgaggagaaaaaacagtatgatttcagcgcacagaattcttactttggttacaaagcgcagggagctatggtggttgacaagcaggggaatccggaccggaacgagttctacaatgtacgtcagcaccgaacacacccacctggacgttcacggtagctgacacaactatccataggtttccaaagacgatattttgggagtcagtgatccgctacccgctccagagaccctgcataaaagccgagctcgattggaatcattcatgcaaggctcacatgcaatcgtaaccctaattctggacatcctgaacgataaacttgccctaccaaagaacacactatccaatatgcaccgactgcgaactgtaagcggtgaccaggtccgatttatcaaagcccctccacagccattagacgacagacgtaccgcgctaggccagcataccgactttggaagcgtgacggtgcttttcaaccgactgggaggactacaagtgctaccgcccggtgccgatgccgaatgggtttatgtcagaccgcttcctggtcatgctattgtcaacctcggggatgcaatggtcaagtttacgaatgggctgtttcggtctaacattcaccgggtcgtggcgccaccggggctccaggctgagtcgacgcggtacagtctcgtgtactttgcacgtcccgaggatagtgtgatgttgcgtcggttggaggaatctgatcggattcctgttatggaggatggtcagactgaagaggtgatcaatagcaaggactggattattcggcgggctctgggtcgtcgggtggaccgtgttgatgatcttgactatgagaagtctgcagggacggagcagctgagtcggaggatcaaggcttagcattgttctaggttgttttgagaatagtgtgaagcttgaaatagattacgctttgcaagtaatacgtcaatctcggcacttgaaaaaaggggatagccatgtgatgtatagccatgggagagagccagtctaatcattcgatggtcttacaactatacgaaaacggcgaggcctatgacttcgccctcacgttttctcaatcgggaaggtacactatcgtgagtattgtttccccttgaaaatatgtaacacccctgaaattcatcaatcgtacccgtggacgtcaatatatattaccgataaaaaaaagcttaaacgataggtctgaccaggggcaaagccgaatccaccaagcccaagagatactacggagcatactacactactttaggaaggagattctactctaaatcagccttctgagctatgaagacaaagtttaagtagattaaggaaaatatacccttcgaacgggcggttagaatctcaccaagacttgacagctccgattcttgaatccgacactttggtaaagataatccagttcggtggggagaatctagattccgaaaacccttcgtgtctcagcgatacgtgcattggtagaaacaaaagcgtatggagtattccgtatccctcttcgatatcagctgatgtgcaatgcgacacattataccccgtatattattctagaatacgatagttatacgatgtactccgtaccccgtagtgcaatccaacatgggcattgacgtgtcaggatctagatgtagtaaatgatctaaccccattgaattggctacatattgacataaggctggcactcggcaaacctgcactctccgacatgacagcctgttctcatatctgtcgatcacaggacctcacatttaatcgctcatatacgaagtacccggaacagcagtgatgcagtgacagcgggtcaatatttttttttgcctcgcgtctcgaccagctggcgctttttcagctacggagtagagcacagaagaccaaaatagcttcttgattgagttagttgaccgttaagatggatccccggccacactacgaatcacattgtgagcgaaaaaaagggcccccgctcaatttccggcgctctggacctgggttgtccacccttactccgaaccgcccactttagttaccccctgacttgttagctttgtcctctgtgcatattaggtactccgtacttttgactagaccctcagtacggagtaaagtacggagtacggagtagacggtgtccagacctcgggatttgataaaataaacgacccaacaatctggatattctgcaataatgcgttatgacagcgggtgacccttccgtctccgggctttcgggtttatgccctgtcgaatccttccctgcagtagtctacatatgttgtactcggctactggtaattacaaacgagggatctctagaactagacaggcataggtaagataggtgacaggggtatggtacttttgttaaggaaaaagcaaaaacatattgtatagatcttgaaccgagccatttaaagatgtctgaatgagcaagcttctccgtgtccttaaacgacatcaattaaaacacgatccaccaacattcctcgagaccacaacaggaaatccaccgaactcaaagccccagaaatcgggagagaaagggctatgggtgacttctccgcgccaataactaatgccctatacgccgtcgtcttcgacccaccgcacggagtactccgtacattattacggcctgactccgttctaaattattgatattttacaaccatacatcgcacggagtaccagctatgtggtaatctccgtcaaagctatgcaccctcaactggatccattgtttcaatataaaaataataaaaaggctcggaccgttcgaacggaaccacacgggctgtgttgcccatctgcccatctacccaccctgcccaagtccccaaatcttactgtaccgaggtttcatggtacgatgtatgttgtcctcggccgaaagcgcccttccatctgaggtgcgtctacggaagagttccggtttgtgctcagcttctgtggcgtcgtggcacccacatcatttgacaagaccccgtaaagatcggggaaatatgcctctagaatggatttggaatcatccaaatgggcgccagataaacggtagaaggcagaaagacacgatgtacgatgtacgatgtactaaacgaggcaattacacatgcatatccccactgtgtggcatgacgtaggaaattactaatgtggaccagtccggtgaattaggaataaacgccgttgggagatgcgggtcggttggtgcagcggtcctctttgggggctttctgtacttaagctattgcgtctggctatccgaggaaatggaaactgggtctgtagtctggtttagtccctgttggggattcccgccgagtttcatgttccgacatgcgcaaatcaagccatacgtttatatgcttacaacgtactccgtagtggatgatggtgtgttgtatacgatatgcacgtccgcccccggccgtcatggaaatgtacacatcatcgggattcgtacgggtgcgcacgcgcaggcatgtgtagtagaacgaggcgttgggaattccctggagctgatctcgattggagatatagtcggtttgaatgtatagaagttaatgccatactatatatgtatgttatatggcatataaaaataagcatgctatcgggatgaatcgagttgaaagcagtacgaataacgcaagagaaaccagtggcagatatcataaaggattgtaatggtcggttgtaaagagaaatcgagtagacagcgtcgtatgttccaagctcaagctgctgattcagcaacgtctggtgttcgttcaagcgccatagctgctagcttctcttcaagacttttgagaacctccgggcttgtttctggtttcacccttttaggtctgaaagaaagaaattgaatgttagcaagaaaatcctataccacatgttgtagggttgagacacgtacggaattcgtatagtttcatcacacttcgcctgaccacaattcaaacatgtttttgcattaccctggaaccaagtctcacaaacatgacactgataatggactctgcgacgaggcttcttgaacgtgcgctcgggtctaggcttgggcggatcagcatcgcccggatatccatcgggatatttatcgagtttggccgggtctcgcgggcatatcttgcagcgcacatggctgcaactcgggcattccttggtgccgggggtaaagagcgaggcgcagaggtgacagttccgacggacccgctggcgcaccggccgacggacgaaatccggaccgccggtgggcgacggcatcttgagcgaaatttcccgggtggtgctgagcttgaggtgcgtggtcctggggaacagatggggtgaatgggcgtatgtctccgggttcttggacttgcgggttgtcggctcgctatccttgctatccttgttgcgggcggatgggtgtcgggggcactttgtgcagcgggtgtgctggcagttgacgcatactttctctgcgccgaaggtggtttcgcagcggtggcaggtacggcgcactcgcatgcggattggcttcgttacacgggttagctggaggtcggggggtgcgttccagtcgctggtgtcgacggtcaggccatatttagcgaagaggctgcgcgccttttcctgttgagttctgctgtagctggtgaacatgaccggtcctgatgggctgggctcttgggctggtgccggtgccggtgctggtgttgctgctggtactgatgccggtgccggtgatgttgcctccggtgcactatatttagtcaagactagtcagcatagtgttgaagtagaataatgtcgtatatcgtacgtggtttcggcttgagtggctaccccaggagtgatagattgtcgtttggacattgaccgaggacggaggacggtcttcatacgcttaaggtatttcgaaaagccctcgggcttgtcttcagggcggtcatgttgagacatggttcaattgaagaaatggtgatatccagagtgtgggaactcattccatacgaaatatgtccagtgtgaaggatgtcagagtggactgatggtaagatccaaaagttggcagggaaaagtaggggcaacccaattattatagagaaggaatcaggaatcagactataatacaagagtattgtataacaattgtataaaaaaaggcccaaagctcagacgtggggattccgatactgtggttctgtggattcggatggtttgggatgctattgaatattcgatgttttattttatttcacttcctctgcttgaaaatgcatttaaaggctttattttatattttattgggtttttcttcgggttttcataggtacaaaggaggagtactatttctccggtcacaattggcagatacttaggcgaaggtgtttctccatactaaccactatagggaggtaccgaggaccaagtaccgatgaccaggtaagccctggtaactccgacgtctcctatttagtctctgatgtgcatccccactcttcctcctccaacccggtgccacttcgacgagaaaaggctttggtctcgaaactctgtggcttcaggagattatctccataagtcatatccgagaatagcgtgccatttcgctggtcttccggcacatcagacatggggccccctgtctcttggcacgccattggttcctctgctttcccgtcttggactggcctatcttcacactggttgacgtttatgtttcgtcaggctccgtacaaaagtacgtactccgtacaaagtacactcctgtcgccttccacggcggtcaaccgatggcgtggcatacaatagtattttggagccaaagggtgggccgggggaccgggaaggagtggtatctgtgctccagctggcctccctacggcagcacccgccatcccggctgcctttccagaaacagctaacttgctggtctatcagtggaagcggatcggggaagaaatagttgaggggcacacaggtgatgagcgtgccttcaatctcttcgttattgcggtcgatcaggaggtttgcgagaattgaattcctttcccttacaacgggaattgaactgccggggaggtgccgagcggatagagttttctctacacggtctttgtgtactttgtatagtaattgtacgatgtagttacatcgtacaacatacaacaatgcattgttactggttggagataaatactccgcacctagatactcggtatatgtaacccattgttctattgatctacaggtagtgctctttatagtgctgactggattattggtttctgggactgtgaagaagtctatgcagaatccagaagcccatgcagaatctctctagcatcgaagggtggcgaaagaaagaacctttgacacacgggcatatctccgacgattggatcagaagaggccatgcatgatgcatgacacggggatcccaaagggcaaagtaaaagtataaatacgagcagttcgtcgatttacgacgcactccgcgatgaaatccaatagcgatcaaataaaaaggaaaagtgctagatatgagggtatgcacgacgtcttcaaatgtaactcaactgttgatcacccctttttggaattttgaggcgattgtcctcagccatgtcatttttgaataccgcaatgaaaattattctacaacccaaggtgggaaacacgagattatactacaatatttttcctacaaaattagtagagccagccccctgggaaataaaagggcaaatgattaaggaaataatttcgcttagtgggcttgagggacgggtgagagtggaggtcggatggtcccagtgccctggtgctgtacggagtatagccgtaaagtacgtactggctaatcttccaagttggataagatattgatgctaatattacttgttatgtatgtagtctggatgccaattgaatagatacttggcaagactctacggtcgtataggatacttcttgtacttgtttatcccggtttctgcatggcctgtcccatgagtacggaagtatagacctgcacagttggcccgcatatgctgtgtgctgtatgctgtatagtataaactgtagcccagaatattagtctcatctgacacaagagcatacaagagtactccacactcaggtatgttaatgatgctctacaactttacattgggcctgtattcttctggcctatctggattctggataccttgccgccgccccccccccccccccccnnnnnnnnnnnnnnnnnnnnnnnnnnnnnnnnnnnnnnnnnnnnnnnnnnnnnnnnnnnnnnnnnnnnnnnnnnnnnnnnnnnnnnnnnnnnnnnnnnnnnnnnnnnnnnnnnnnnnnnnnnnnnnnnnnnnnnnnnnnnnnnnnnnnnttgatacccttcccccccccccccccccccccttcgcgtactgctacatagtacctacatatcactgttccaaatattgtgcattctttttcaaagtctttttagatgtcttactgggccccgagggaaacgcggatgacacgcccgcgttgccaccgccattccatttgccaaatcattgcggtcttttgtactatccttttactactggattgcgtgaactatatatgtatcgatatgaagatcactatatggcgctgaaattatcggagttgaagacaatagaagcaatgtatctgcaaacatcgtaaaatatcttgattttttcacgtgtagtagaccacatctcgacaagatatgaactcctagatcatacgagctgcacatacaacatacagcaaatccaccgaccaaattctagctaaacaagaaaagcagtttagtgaacagtggagagcaagcacatctcgtagtgggcgatcacatttggagggggaccaatcaaccacagccgtttatattgcatgtccacttcaatcggcatgttgcaagaaaatagggacaaaccgccaattgtatcaatcaaaagacccagaatccttttcaacggccacacacggcgggaccagcggagtcatacgagcgtatgaactagacagtcatcggctcctaaatctggtgagatcgaaaggcttttgcgctggatagctgggttgagtccctagtgagcactaggtcagccgggctttttatccgtggctggcggtgatcgatggcttagctggagaggggcagagccagctcccctgggcaggaggactgactattcgtgaatggatagtaatgacgaccaaaaccattacaagcgttcttttatcaagccataggccgtacagcgtcaattgacatataacatctgccggctgagccagataagaatcggcatgaccgaatgacaggccttggccattctaggaaacgcaacatagctatctgatatttgagagttcataactcgtgagatctaccactagcttggttatacgaactgtaccttgaaaatcatccggctgatagatcacaaacctcgttcttgggactatgcccctacatgatcgacgcgagcttgaaatcccggcaatcaggttggtctagcagccaattgcatatcagatttgaattccagaagtgtgtgcatttacaagccaataggatacagccaatccgcaaaaaaaccaaaaagcaaaacgccctttatacaaaacccacgccttgggtatatgctcaatccaccgaaggacatgctctccaatcaaaagacgatttgactagccgatgcggcttaatccgacccggtcagcttggacttgatgttgatgatatcttcatcggcctccacctcaatcactcggttgacttgggcactgctgcgcatcagctccactgcatttgcatacgacatgcgttgcatcgggttgcagttctcagggagccagtagaggagaacgtaagggaccgagggacggccgtctctctatatctcattagtacgtgaggcctgcattattgatggacgacttacggtagtcattgggtggctgaggagaatgaaccgcggcgaggattcgggaagatcatcggccagatcttccatcttggagtagacttcattgtcttgcggccggatttcttgagtctttgtatcaatcatatctatttgcgtgatacgtcagcttcggacgcaggcaatgtatggttatggctggcactatctacgtgctatatagcccgcctggtctcgaaatgtatggcaggtgtgggaaagcgcagagttaggggcccgtacagatgatagcttgcgcatccttggctctcgatgtgcccagacgaaacttgcgcagcttctccttagtctcgggcgagaacgaatatagtcgtgaatcagactactaaagttagcatctgatgggggaaactttcgcctggccgacctggtgccctggtgcggggagacatctcaccattttggacgtcaactgtgggacacgcagagaagtcaagtaaacgaaagttctcagcctagcgctaataatgcactgtataaagatgataccggtatgtccgacctgaaaaaggagaagactgtaggaatgtgaggcgagacgatggaaatgcgggcggagtttccctgttcccccacctcaatccctccacgctttgaacaatctagacattactcctccacctatatcttcatgctcaaccgattgaatctactgacgcggcacttatcacgcccattcagtccctctcgtcctataagcccctccttctcggccccttccctggccgctcgctcaggtctatccgcgatgacatcagccgtgcacccgaagctcatccacacggcagcatgcctcattatcggcgatgaggttctcggcggaaaggtagtttgagatatcgataggctccccgtgaacagaacatatattctgacattatcgacccttagaccgttgacaccaactcggcattcctagccaagttctgcttctcgctcggcatcgacctgaagcgaatcgaggttatccccgatgatgaagatgacatagtcgaagctgtacgacgcatgagctcccgctatgacttcgtcgtgaccagcggcggaattgggcccacgtgtgtccaaccccgtccctagtttccccgagcgatgccgacagcacgcaagcaacgcagcgcttcatacaaagcctagctaacacatgtcccccatttacagacacgacgacatcacatactcttcaatcgccaaggcattcgacctgaagctggaattgcaccaggcggccttcgagcgcatgaagcgcctctccaagccccaccccttgcaacagaacttcgactgggagacaccatcgccaggactgaccgccaagctgcgcatggtcgagctgcccttcgacccgaagatccccgctgagtcacaggccgtgttcgtcgccgatgacctgtgggtgccgatcgcggtggtgaacggcaacgtgcacatcctgcccggcgtgccgcggctcttcgagcgcctgctgcttagcttgaagccctctcttattccccgtttgaccgacccggaaggcaaggggacgttccgcttgttgttcagcacgccgttgcctgagagtgcggtcgcgccatatctgactgagttggcggctagggttaaggctcggggggtcaaggttggcagctatccgcgttggggtaaaaagcgcaatactgttactttggtcggggcggataaggcttacatggattccttggccagtgaggttgcggagaatgtgcagggtacgctggttgccacggaagatgagctggattgtccgtccgacgaggaccgtgtttacagtcagtagattatttattacatagttgtctagattgactgcgacttgaaatacatgcagcacatagagcctaccaaatatatattagtgtcaaacatggctatcttgaccaggttagattatcaaccttgatatatcaaagcagtagccgtaggaaccagatcataaattgcgatcgagaataggcggtatatcatacgcagagcattcgagagtagatagaacgatctagatactagacaacctcaaaaacaaaggtacaggccgcaatgatggaagcaaggcatccaccttgctatgaaagaacatatattgacagccgtgtcgcctcacgagagcgacaaggataatgataataagaggcgatagataacaaacaccagggatctttcgcaaagacttcgacagtaaaaagacaataaatagggattaaaacatcgcaatcggacaacaaaaggggaatcaaaaatgtttcgtgagacgaggttgggcgtcaaggtcggcagtcatcaagaatgcgagtccattgaagaacccacaaacatccgtaacacaaacgacaatgccacttcttctttggtaatttttttctggtttggtttgttttctgttcgaggttgcaagctttcgttttgcagtctctgtattgtttcccatttagatctgagtggcgggttattgcagattaaggccatccaaaggtaaacaagatatccaacttttccaagggcaggtgggtgttcaccacatgctcggacatataaatccacccccgtaactcttcccgacattgtgtgctgcgtatttcggattcgggggttgtttcgagatctgccggcatcgcaacgattcggatcattttggtaggttggtgttttttttacatgatgacgcaactcgcgcagcaaccagcgctctcgcctggctcggccacgtccatcttgccctcgggtgcgcgggcgccgaacgcgccggagccggaggggtacgaggacatttccttgttgtagcgacggatctcgcggacgaggtcgtagaaggcgttctcgacgttgatacgggacttggcggaggtttcgatgaacttgcagccgaactgacgggcgagcgcttcgccctctgtacgcggtgaatgttagtttcggggttcggatttaggtttccagagagttcaagcggagagttcagggtaatggaaacatacctgcctcggagaccacacgctccttttccaaatcacacttgttggcaacaacaatgatggggaagtaatccttgtccttgacgcgcaggatttgctgttggaaggtcatgatttcttcgaaggattggcgtgatgtaatggagtagatgagcaggaatccctcgccggttcgcatgtattgttctcgcatagccgagtattcctcctggcctgctgtatccaggacatccaacaaagcgacttcatcatcgatcacacactgcttgcggtaggaatctgtaggcggaagaaggttccgaattagccatgctgttcaaccagggcccggcaccgctggggaaaagcgataggacccgcgcggttgataaaatgggttgaggggggacgtcgaagtgctcaccttcaattgttggatcgtactcgtccacgaagtggctctggatcagctggatggtcaaacaggacttgccgacaccaccaccgccgacgaccaccagcttgtattctcttaggaactgttggagacggggttagccatttggaatgaccaaaacaagtcggatccggcacattggatcaccatctcacctttgaagccattatgagttagtctcagggaagatgaaacagaaaagagatattaagccgatcagaaaggaatcggacaatttaaagcgaaatccacctgggtcgtttaagaaaaaaacaaaaggagaattagggggagagttcggaggttggaactggcgggaagaaataaatggagaaaaccagcgagcttcgaagatttggcgaattcgttcaaatccgtctggggtaaacaaaaggatttaaaatcaaacacaaagagatcttgttcccttttttttttctagagaagacagaatcgaaagaagaagggaaagaaggggcgaagggaaattcaggagatagtggggaggaaaaggtgattgggcgaggaaaaggggacatgcgcgccattgaatgatagattgcttttatatttactattgttcctaccgtttattttggttcttcagctcttcgattcatctatataacacaagtagcactgtgggcgccttatctccaatttcgccttcctccttcctccttcctccttcattccgatatacgttggtacactaaattgtatctcggccagggcattgattggcttaagccacggacccattgaggaacgtgccattctaatatagagcggagatattgctccttttacttgcatctccatcaagtccgccattaccggcctctgttttgtctactccgtgctggttccaacacatctccaacataccatcgccagatcaggtcagttcctccagagtggatctgccgtcccgagatgggtcctctttggcgcctttggggattggcctacaatgtccaccctctactccatattggctggtgagagataacacgaagccatcatccagatagcaattcaaggttgggatagttgggcaccaaacagtctggatggtttgctcgacaccgcatattcatcttggctttcttatacgcctggatggcttgcagtagacgcccgccttgcataattgcatcatcccgccgcaacacagtcagctctgtcatttttgatgattggatccatccaaaaaattgtgattctcgtcgcggttccacttttagaacccccatcgtacgaatcatcggaacgtttgatgccgacaactgggttttccccgatcgccgtatgccttacgaagatccaagtcacgcccgttttctgacagatgacacagcggcatattggacgtccacacttcttttcttcggtgttctctgcttataaactgcttagactagcgttgacaggcggaaccccgcgattgaagacttggatctggccccggagtatgtgcagtgtcacatttgggcacctcaagctaggtaatgtctataacaagcttcacctagctatactttgacactctttgactttttaccgatcatagaatccttgaaatgatgtcaaagcgaacgaaaataaaagtaaaaaaaacaattatgcgcttggtccacggttcttccccgggggccatgcccgtcttgacctagacaggactctgttggtgtcttttccacggatgactggaactcaattccttgtcggttcaaatatttgtctcaacgttggcaaagaggcgagatcaacctgggatgtcccgatattactagtcgacattcaaatttcaatatcccattccatacattatcttagaaggtgagatttgataatccacaaggctgcattctttgattcgcaatgtgggctgatcctgatatgacccgtcaaacggacggtctgtgatggatcatggctcgggtgatcatgcaactgtcagcatccggaagtagtgcgactgtgtttcgaagcagcgcttatgaaggactaccatgggacaattacgagaaggcgaaaatgagccgcacaaatcgatatagaaaatgcaattggtagacattatccagtatctactgacaaatctacttgccaagtcacacagacgtgatacatacctagaaccaacacaacctaggcttgcatagtgcggagcgatcatgcttgtcatgccaacggccaaatgcattttgaaatcgagaggcgcaccatccacatagagtgctttatacatatatcaaccagctcaataaatgtatactcgaaattacagctgtcccaggaaataagaaccggacagataccccgggatcacagctaagaaaagaccgaatcacactcgacctaacttgggaccgaaggcatcaccaatcgcactcgacgtgcaacagggcatgggggtacaagttcctgggcacatgagcaataataataaacacaacatgtccaatctgtagatttaagtacctgaccctgaagaaatcaccgtaaaaatctgtctagagaacgagcgcgacccaatccgtgccctacccaacgcccaaggagactaaacaaactgacaacaagccaaacgccgaatatcccaaactccatccaataacctccaatgtctcttgcagatctccaagtcggcggactgtatgtcattctccaagcccatcatgaaccacccgagcccaatgagttctactggggtctatacctccactcagaccccgtgggagggatggcataccacgtcatagacacaggatctggcctgagaccggagcacgagtatactggtagaatattcgacacgccgcttctgacgggactgttccgaatcgccgatatcactcgtcccttgcatccatttgtcgacagggtagtaaggtcctacgacagcagcctcaactgtcccggaagaagcagcaacagcaagttctgggttttgaatgtccttgcgctactgatccagcctacggccaccggatggcttccagtgaattgccataacctgccgatcttggagcaggaaatccgcgattgggggaatcgcatgtcccaagggcgatgtatatatcagagactaaagccgattggatcttcgacgatctgcgggttgccggaatggaagatatagcgtgagttgaccatttctctcggtaatcctagtgcgggggaaacatcgattgacgcaaaggcaatggaatgaatagccgaataccctatctattcaacaggtccaatcatttgactatggtttcttgtttcgggcgctaattgacgggtatattatttcgtgtttatcaaatcaagcgattacttgcatattctacctgtcatttttttggacctaggttattaattccaaagcttaagcatactacattgactcatagtaatctgctctctattaatactacagttacttccataatctcccttggcagctcaagtctcatccaaagtagaaactggtcaggtgcctgtgtgagaagtacctccacacccgtaacagtgtcccacccctggttctgctgtgctgccgtcaatagcggcatcttcctcggcttgtacgacatctcgatacacaaacccagatcttcattcaacgagactgatcctcggtagtcgtatcatcgggtgccagattgaggagcagtggcgtttgcggcctggggggaatatatcctgaaactggaccgggggggggttgcatgaatgtctcgagacagccgaatagaacaagggaactaacttactaaattctagttactggaaatgaatactatagacatggaagatcattagaccaaaagaatcggtttctccaaagattttgcccattaaatgtttggtcatcgtcggcatgctaaaaccgtttgtggggagaagcataattattgtaccgacttgccaaagagtagtcatatggaaaatgaattgatgtatgcaaggatgatatgctagcaatatatcttatgaataacatgcatattgtagtcgcaactctgcttcacaaacttcaattgagctgaagcctctgctgtagcttcttccaagacgcaatacccctctgcgcatgctgatcgggtacatgttgaccctcttcagccatcgttctcgaaaacaactccatcgagatccatcccttgtatcccaatcccgacgtaatagttcttgcaacatcttccacaggcagatatactccgcggtcctcctcgtacatgtaagctctcgcattccgcgaccagttcatccgcgccggctgaccttccacgtagaacggatgacccgggaccagtggcgattgcaacctctctgcatctacaacctgaagataaaagacctttgcaacatcgacctcggccaccatccgctcgagcgactccttcaaatctgaatccgcattggccgtcttgccggttggcgaggtggggtcggcccacaccttccccgcgatgttgaaggtgtcaagacacatgccgaaattaggtcggtcaacgcgcttaaccacatcccagactttctcccaggtgtcgttgaccgtgctccagcagagattctcatacgcatagcgaataacgggagtttcggcggcgcccatatccgccagttgcctcagatcggccactataacatcaatgtcgtccgtaagttgctctgccgggaggaagttggcggggatttggatggtggtggtgtccaagcgtttggcgagctgcagccacagtttcatcttttcaatcagctttgcatgctgctctcggtctttgagtccctcgtagaagaggaacggctgcagcgtgataatctcgagggagtgggcttgacagattgagtggatcttatctgctgcttggagcagttgattggatgttggggtgtcattcttggaaatccctcgtgcgaaataatcgaggtcttcgtagaaaagctctactcctttgaaacccgcttttgaagcttggcccatcttatattcaaaatcatgaagccaaggtcgtcccaaggagacactcataatagcaggttgatagaccatggtgtctctgtatgggaatttgaatttgacaatgagttaagttggtgagatattcctgtggaggatgttgatgctatgtacgcggagtccacgggttgtggggtaagaaggtcttgccgttgtcggttcagatcttcgccgtacgtacggaggaagattctacgattgggtctaatgagatatttctgcatgttgactgttggcatatatgacttgagaagtctcggccctggtgcttttctcctctcaagaaatcatctcttcaccccaagaggaggaagtcgtcgcccgttattggggttcgggtaaatcaacaccgatcacgtgatacgaacggcatcagcttggatgaccatgaaagctcgagaaccaatggcttttatttatttcagagcacatatgcccattcttcgaccttcaagtgttcaagtgtttgcggggcatgtgatcaatgtcgttggtgaaagtccaagtgtgagggaactgcctgcttgctccaccgcaatcacatcggagcactcggaaacacacgactactaagggatatagactttggtcggtgagtaaaaagctggatagggggtaatcctcatacgagatcagttagataaagacctatcaacataatgttaatttgtttctacacctcgactaaaagcaaaactcgatattataaaatgagaaaacgtgccgcgaaaaaataatcccaggcttctttcatgccaaagatgaaacaatcgaaagccaacccaggccagccgatgctgcttcgatcccctgagtatccttttgcgggggatgggtggcgcgagccaacctcgacaactggaccgcgagcaaatgctctctgaaatacatatccaagccaccaaccatgtgaatgctgtgatcaacaccgctccctcccttcttctctccccagcacagcctggggccaacaatttcatcttccatcttgccggtcctacttccacttttagcccacacccgcttcgtctcatacaaagtctcccaggcgatgccaaagctcccaaacatcccgccttccttcttaccctctgccgctgcactcttccaaacgaaattgcgacctccatactcaaatcgtcgcggcgaccaatcctttctctgcatctccccatccggaatctcggtaattgcgcctatatcggggattgtccgtgtggtcatccggaaactgcctcctttagtcttctgcagcttcacactcgtcgccccgatctgaggtaagaattccccggcacgtcggagtaccgtgtcgacgatgggtgcctcgttgctccagacgaattggagggcgtacaagacgtgcgtgttggtcgagtctttgacgaaaaaccaatatgagcgcagacccaggttgaccagctccgaggaatgcgtaatccggtacgtgactgggggcgccgacggagaaagagtcagcgagaagaaggggcgttgcgaggtgtcggtattgaggaatggctggaggtgggctggagctgtgctgatatccgttgcagattgactgggatcgtctccgcggaaagtattaagatccttgcgaatctggcagttgatcagggtcagtgatctagaagaggtgtacggggtcctggactgtgtggtttacctgggtcaacgaccaagtcgttccgtcttcgttttccacctcctccatcgcatccaaaatcgtcggaggcaatattataccatcgaagctgcccttgcgctttaggtcttcgagataggccaggcgctctcgatgaacttggacctgtctctcaaacatttttctgttgattttgaggacatttcctttcttgtatattttgattgctgaatccaaaacagtgatggcatttttgtagacttgtatggcttcatcgtactcgcccttgcgttccaaaatgaagggcaaggcggcgagcttgtagaccttattgttggcatcgatttttcctgtcattgcgttggtcggaaaatagtatattaatttgaaagatgggttctatatctggtagtagtgatcggttgagttagtagacctttgcattcccatggcgctcctttataattgaagacatcggagcttttctttgtagcttatgccaaggtaggaatatgccttgccaaggagcttccgtgtaaaatcgagcctatataggacatgagttcgtgtggcagttgtcgctaacgcttgtactcgaatcagggtgcagcttgggcttcctttgggagaaagaacttggcattttgatgcaaatgatcacctgcagtatcagccatgagtccatgacagtctgtctcacagagccttatgaacttcagttgagatatgcttggctgattcttggagaaaaggatactaactaatcgcttagtattaccctctttgaagcttggcaatggcttagcggggaagcactggctttggggcacatggccgtcaagcaccttgaaacatatggtgactcagccttcaggtccttcgactattttcaaaaagttatgtttgcgaggcttcggccaaatcaaaacagcgcgcattgaatcacgaaggaatgggttgagggatccactgagggagctattattttccatctagggacgtgaccatgataatgtgataaagaacaagagcctctcaaacgtaactggaattcttacgaaatggatcccgaccaaggctttgatgtctttctagcatggtgtattgacacggtccgtaactacaaggaaagagtgctaaaagtcactttcgacactcacgcttgaatagaaacgtatagaacttgaacccattttcaatatcgggtgccatagagataatatactactttcctcactaacagtgccagtgctgcggccaccacctctgttttctccaccaagctcagtgcaaacgttgataatgtgaaaattgaacacaagtaagaaacatccgatgcttaatcttcctgtccaagctgtgacatgtgattatagtgcggggtcaaatctatcatacaagattccgtcagccattcttctctgatcactgacacataaagtgattgctttattgatcaatattcgtgataatagtcctcagaaactatacttcaagatgcagactacagtctttgacaaagcttgtgccatggagcttctagaatttgcgaacccttttcttgaggaaaagggtctttcgtcacactcatgggccaaaatgcctaatcctgcttgctccgctcccctccttcgagtatgggacaaaaactctggcagtcatcccgatcaatcaaatagaatgctggctcgtttgccccgacagcggttgggttcgcgagaaagtcgagaaaagtcactagccacacatgctgcctatcagatatgggagccaacgccattcatatcctttactgcatcagtattaggtctgcaaagattcctgtctaggagaaaggggccacggttcccgcgaacacttacggttatcaatccaaacgttcgcatcgccaacggtctaccgatactcgaaatggaatcagaactaagatattacgaagtgcaggacccatatagaagggcgtattctttctatagagatgaatatctctgtctttgggaggttacgcctgatgaggtcgtagcacactgggactgggatgaccttatagaggacgtccattggtacgaggacaaaatactacctgctttcaaggagcacaacgatcgcttcttacgcagaagtcagattgagacgacttttgatatgtcaacactgcaaagtgctttgcccggcatgttctctttctcagtcaacagagacgaactgtctgggtcagacctggaccgttctcctgaagcagactcatttccaaatgaaaattggagtttctcaagcgaggaggagaattggcaggttgaagatgacacttattgggacacagacgatgaagtggaggagtccaacgcgattgatgattcatttaagatccttgaaggcgactggtgaaaacgatccttgcagaacagggaatggcgaaggttaaagaagggtagattgatgtctaccctggccctaaataaaaccacatggagcaaccctgtgattcaaacacgagatgtcaaaggctcacagtatcaccaaaaatacgactttttcctcgtgtcaatcattatgtttcagacatgcaaggcagcagctgccgtatgaattctaccctacactaaatcatagatattaccgggctcgcttcagtaacttagttaattctatagtatcagaacctttttaagcttcttctccaataacagctgccagaaggcatttgggggtccctgtagtagctatacaccaccattacacgctagtgtattttttaaaaaggaaaaaaaggttgagacagaacttttgaaatggacctccataggtactatgtagtatgtactgtaaaagatccccacaatgctaatgttcctcaggccatcggcttaaattgaaaaggaaaaagaaaaagggtcgggggaattgaggctgagggtcccggctaggcagccaggcagtccagcaagggactagcttggtggaaattggccctggagccccgagtccacttagataggcatatcatgtgttacttggaatatttcggcgctctttttctatctataaagtcctaacgagcgcaatatttttagcctaagagtacagccacaccgtaaccgccaaactacaaagtacaggaattggaaattttcgagtcccggccaggcttgccctgtctggacccttccgagctattttggtggccattaaggggtccaggtggccgcactagcaccgcactagcaccgaagaggaaagaaaatatctcttagtcggctagaataaaaggaaccagccaatgggaaggcttcgtttcagttgtagatttccaagctttccaaggtttccgtctagatgcttactgcgctgaaattgaaatggacttatataactatctccaagtccatcttcttgtctccttttcacgtacaaattccatttctgtcgctcgttgactaccccgacattcgttaattcgtcatttcgttcattcattcattcattcgttattcattcaatacaacatgcgtctccaatctctcgctcttttggccggtgccactacagccctcgctgtccagacaacctctcttttcctccccggattcgacgagcaacgaattgatggcaaggtcattggcactgtatgtgcaatcatcctctctgttgatttagcacaggaagttgactaatatctttccagagcggctccatgaccaaatattatctcaagtgcgctcccaatgttgacgccgacgagtgcggccttcccttcgatggtatgaccgtggcccaaggcccttcaaccgtcagcctggcatacagcacagaggatgtgtaagtaactatctgcaccacttatatatacccccacactcagagctgatcctttcccgaaacagcaccatcagcgagagctgcaagttcgattccataagcgcgacgtgcggcgcaaccgtcgtgaccgatggcagcacctcctcgtggcactcggccatcgcaatcagcgaaatccccggtggcgtgtacatgcccgtgactatcactgcaactggaactgacggctcttccgccaccactggtgctgccgtctccgcttctacggccgcttcgactagcgctgctactatgactacctctgcttctacttctgatagcaccgctgctggaactagcactggaactagcaccggaacgagcactgacagcagtgctgctgccaccagccagactgagactggtaatgctgctatgcctatgattactggaaacgcgcgctgggctgccggtggtgttgctgctgcactggccctcgccgctctctgatcatcgggtcgttttcttggaatgaacttggatgcccaacttcgttaatgcctgtctcgataaatatgtacctttctcatgtataatatgcaatatacgaagcgtgtaatactttgtacttcggtctgatagacctttcaaaacctatattgttggcggtcgaatatgtacttcatattcacgcaacacaaccggaggccttgcaacatgtacaatgagcgccatctaaagcctctatatcttcactctgctttatggagtgtaagttacgacttgcggtgcatgacgccagccgaagcctatagattgtcagaacatgtctataacaagatttaaccgcaaaataagcttacctggtggctggggaagaccagggtatcggcgatcacaacgttctcgcgacgcccagctgcaaagacaatcacctcggcgatgtcatcaccggtcaatggttcgacgcccctgccaattgttaactatattctgtttcagttcccttagcatgacttacttgtagacagcatcagccttagacttgtctccatagaatcgcacaacggagaactcctaatcacgatattagcttcatatcaaaggcgaataatatatgcgatgcccataccgtctcaacttgaccaggatcgatttcaatgatacggattctcgtggcgacgagctcctttctcagagcatcagtgaacgagcggacagccgccttggtggagcagtagatgctaccaccagagtaaggctcgcggccggcgatactgccaatgttgataatatcgccacggccaccctcagagcgcttcttgaagatgggcaggatggcctgggtcatgttaatgagaccagtgacgttggtgtcaaacatgaccttgatatcctcggcagcaatcgaaggtgcctgggcaacacccttgaccaagccactttcaccgtgaatgtcagtatcgaccgtgcatatcaatcagtttagcttggtgtgcatgactcacgcattgttgacaaggacgtcaatctcccggaactcctcgggcagggaggaaacaaagttgctcacttcctctgggttgctgacatccagcttgacgggaagaacctggacaccattgccgacctccttcgtgatctccgccgcgacctccttcaatgtgtcgatgcggcgcgcggtaaggatcaacttcaggttcttgggcgacgtacgggcgaactcctgggcagtgctctttccaatgccagatgaggcaccggtaatgacgatagtcttgccttcgaggcgctttgccattgcggaagccatggtgcgtcggatagaagttcggaaggtggggcttgcgaagagagctggggatgtagaggggcgtgagagtcgttgaaagagtccaattaatctgaagcacgctcgtagacgggtcatggatcgaagtctctatttttcaaggagaaatgaaacgcagaacccaaaataaatagattgatcacgaacgagtgcggggactctggcgtcatattgtgttatgtaatcccagacaacgctcgcccgcgatcggcaagaaggccgatatttcttatctcgagataatcgtgccaagcccccactagttatgggccacgaatcgacgtacgtgggagtaattccacccttgccgaaataggaacctaccgatgactattcccgtatagctgggtagtgaattgggtaattgtgcagggagtaagaagctagcttgggaattgagaaaatcaaagtgttcattttgtgcctatgtatctgctgtatggaatatctatacaaaagatacttaatgcacagtgactcacaaacacagcaaagatgttgtagggcgcttgacacggttttcggaggtcatgttgataatggagtttgtctctgaatgcctcatcatattctttgtactccttagagtgactaagatgggagacaaagccccgtaggacttgttcaaagaaatagttcctctttaaaggaaaatgccctaattgggatggtcatcttgaacatgacaaagggccaagtgcatgatcatggtgattaacgcgagactcgttgtagctggacaaagatcaaatgaatgccattgtctacatttccttggaggacatcgattcatagttctaaagaccaggtactgcccccgatacatctaataaataaccttgatgatacccagcagtgtacagcaatcacagcgtcggctctttcccttgagcccttttttgatcgttttgttcagacagagagagcaagggtcgttccttctatatccagcgcagcaaaaacaccacggtaacctaccacctcttcctagatacaaccttgttgacattctaacatttgcttcatgtgcatatatcctagaatcacgaccacacggctcgattgcaattacttacatgggatattgatgacaacatctatcggatattacaagatatttcatcaggatgccttctccagccagggtttgctatatgactcctctgaacattgtgtcaaaccgtaatggaagcttacatgaatcttcttcaacccagaaagcttcatctgatgagcttcttcgccggtgtgattttgattgggccgaagatgttggggacgctgcgaccaacgataattcacatatgcccatcacaccagaccctcttggttacccattgccaaagccagatatacacaatgagatatatcctactactcgctatcttagatatcccaattataggccatcactcccaactgtctatgaagaagtctgggatgagacattgggctgggtacatggcactcaagatataacctccagctcttctgagagaatattcacagactccgatgatgatactaccgatctttcagcatacgagggatctcccatcaatgacgagttagctcagaacatgttcacagtcaacggtgaaccagacctccacttggctgcacaacagtctatcaacaatatctttggggaccgtcaggcctggatcaatgccgatacagggattcatcacttcaactggatggggctacgagtttacacacgcagctcgacctctccgtctgattcgctagccattatcctcgcaaagccaaaaaagccacagggaggtgccatgtggagagtttactcagttctaaaccgagctacccagtacattgaccccgtacttgtatttttggatcaccaagatgaaagtttgtttgaactccgaggctcagagcttgtacgtgcctccgctggacgtgttttcaaattttattcgcctcatggaatgtggatggaggattcgagcgatacgaatgacgatattacgacagactttggtaatacccggacttacgaagcgacaggtttagccgttggaaatggctttgttgagtcgagtgccattcgctcactgtcacaatggactgagtgccgtgatgaagcctctgaagccgctgagagatcgagtcggtttccccgacggaggacttgggagcggaaaccctcaccactgcgacaatgcgagtctataaaagactcagagtaccctgaggcctcaagctcactggcgttcaagcaggcgaagagaccgcctcgtaagattacaacttgtgtagctggggcaccgcgtgaagaatatttctccttcccgactcctatctttggtcgctatagggcaatcaaaaaagcattccaaaaggtgcagcgggggtggaaatcgatgctcagatcaatcaagcacactctgagctaggtagtagtccctcttctcctcgatcggattagctttgcatctaatttagattgtttggatcttgaactcacatttggcaggtttcactttgctctttgattgccgcctgtttggattgatcagattgagcttactctttggatttgctcaggatcagcttccatttggcaaggatttttgtggattttctattttctccatgtcgatatttcaaatttattgttgagaaaatcaagaaccaaagaaagggccgtgtctcttacgttcaaatgttgtctttctttcatttcctttatctgactatcagcttggttttgggccactttcatatctggatgagtccatcatgccttcgttttagtttcatttgtgcgagatcaagatctatgctgtacatccttatcaaagaatttatgaaggcttccttcaatataaagcagacaagtagaatgcgtacatgttttgaagttctaaatctcatgagcacaagcggctgggtatatatattcttcatggatggctggcaagcaacgttgccggcggtggctgtccaaaggatatctaatggcgaatgatcacgtagtgtctttatgagaaacaaccagagcgcattcggctagatgatgtcggaggagagaaggagaggtgaacatgtaatggcgatcgtactacgttgtatctgtaaagaggaaaacaactggtgtcgattctgctaagttctcatggacagaagggagagagagagaggaagagaaagcggaactatctggtgatctgtacccacatgggtgactgccttccggacacccaacaatatctgatgcaatccggtaggctcaacgcggacttgattcataagtctccattctcacccgctttctgacagaggatctatagaaaggtatgatagactccgctcgcatctttcaagtcttccatccaccttccatgtggcgagtaaaacttaaaccaggcttggattctgaactgcactcgacatggccaaaatttgttgatatagtgctggatggcgtgatttcgaatgtcatgccttgtatggtcccccactcgatgacgctcttgaactccgttcctccgtcgaggcgccaaatcctagggtatctcccggtcctaagcttgatcttctcgtagaacgatttcagcttaacggatgcctcgcccttattggttagggttggtccttcgaggtaacgggtcgcatcgtcgaaggaaaagtagtctgacttgcagacacttcctcgagagtgccgtacctcgtcggcccctcggaagaaaacgaagaagactcctccgacgagtcaagtatctgaccactgtgttgttgtcctttttcctcaagcaccttccgttatctggatttttgctgtacccgaatgcataaatgcaagtgacacctcaggtgttcgtgtataaactggccagtcgagccagatctagtggtgggttgtaccatcctggttgcaaattgccgctcggtacttgaatttgtcgagctagcaccgggagaccgtcacgagctgcagaattcgagctaatcttgacagttggactggcttcaaggacccaagaggtacgaatgagcgctcgaagattgggaagtattgactgttggattaaaataacagtgcgatccctatgcttcttgttgcacacttgcctagggcacaggctgttgctgcgtgcctagatccccccaaacacccagcttctttggctgactctagtacccgattggatgtcaggactcgatagagtgtctggccccgcgagcaggggacgtataggtcattggcgcgaacatccacaacatggtgaagtgcagacttgtgattctcgatttgctcgttgatagtgcgggccaagctcgcaccccccgagaggaaaacctgatcgcgataaatctgcattaggtaggatgcatgtagattatcctatcgattttagccacaattagtctcctagtcccctcacaaaataaataggcagagtggggaagacatactatccgagtgattgtgaaaagccatccaactcctagccaagatgattcctaaagggaaggagccgttgggctttgtgtataaatgaatatatcatgaatggcttctgtagcaatgagaatgcgatataataaacgatcacctaagaaaaagaatatatatggatttataaatgatggtgatatgaaaatagaaagagagccaaggaggcagagagctggctgtcgttatatctaggtcctgacttacgagggccttaggccatcaagcattattctgtggcggagggagagaatgtcacggtctacgattaatcgctatcatgtgcttcatgtttgctcgtttgctcgctcgactactgtttgcattccatagattgtttgttagatagctaagcgagaaggttggttgtttgcaacgtttgcaaagtggtcagctatgtcattccactttgcaacttgcttcttctttgttcatcctacgttttagttgaatgcacttcatagggaccgcactctttcccttcgacgaggacgcaccctgtgatgagggaaaaggcgtggcatccgcaccgaaggaaaaaggtattgttaacttttcaggtgtacgttcctaatcgggtaactactgcatcttacaccccttccgatttactataccgccttcgcgggaaatagcagctaccgatcatgtgatatttttgtgtgtttttgattactaagtttgtccacaagattgccattttcggagcaattgtttttatttttagttagttaaagattttattgaggttttctgccacatatacactcgccttatcatcgattttccaccacttttcactatgtaaaccggaagtgggcagaatatacggcagaaattatggcagaatacattgtcgtgcctaatcgggaaggttgtactgagggttgcatcaacaatcctcatattatactttgttcgagcataaatagtgtactatgtagcagtatatgggcagaaggaaacacctaaaatggttgagtctcctttttctttggtggagagtcctcgggggtcgttgaatcaacgttccccgacattttgggctaaaggatggtgaccgactacacgaggcagtagatcaaattgggtttttgtactccgtatgtacagtagaacggccaagaatgcgacggtcgacaaatcaaaaagtcgaacggccagcaagattggcggtcaaccaattggaaggatggaagcgcactgtgtggagtgcagtgaccgggatgtaagtctcggccggttggaattccgattcgcgaaatgagattccaggatggggcggtgcgatgctagcaccaatgggaggaaataagggattgaagcttgcagtgatgcagaggcttcaagaacgagggcttatgacctgtttgagatggaatcaagaagtctatggatgaaaacgtagatactatggaaagtctcgtgaattgcgtgaggaaagaaaaggaaactacctatgcgctgggactaaagtagttgtcgggagcggagagaggtgacttcgaacagttccttttcaaatgggtgaagaaatatcagagtgcagtgaactgaatcagagtgcgaactcatcacgatatcagctgcgagcaataataacctgtaaacaaaattctattcttcaagtatctagcgccaaactatcatatgatatccaaccatatgaaagcaagccaaaatgaaaccaatcatagaaaggaccgtagtcctaaagtgactgaaatgtcacttgacagtggcagcattccgagaaagaacctcaacctcaaccctccttagtctgacaatgatgaaagagtctcaggtaaaagcacgcgtggggtgaaagctgctcttatcaaatgcaatgccctcttcatgaatccccacatgattccaagggggaaaacgaacatttcgcgggggatgttactaaaagtaaccagaggcttttcgatgaatatgcccatactgccaaacgggagagaaaatactgtattaggaacagtggtaggcacaggccaggtcttcttcatgatggttctcataattccaatggggaaaacgacagagctgtgaatcgtctttgtggtgatccgagccttttgagtattgcccacgatctcaagtgggacagaagagaaagtgaggggtcggcttggtggtgatagctccttggatgatgtcgactcgatcttgagcttggaaggcgtcggcttccaagtgcgtttccgaggagagcgaacgggttccttgctggcagcaactagttgatctcgccaatccaaccactcatatcgagaaataaacggtccaccttcaagaaggccatttgcaacggcgaatcgcccgattgcaaatctttccaattctgactccccagcatcaggaacgatccttcgccgcattgagaaatcatcactcatccaatttccgtggagagaatagtgagtgtaggtgagaccttcgcatgcttcaatcattgcagacccatacatttgcaagataccttcgtcccctctgtccacttttaaaatgacagggtcaatgtactcgattgcacatttcatgatcgagtttacacggagcttatctcttccccgtggtgctttcggtatagcttgcataaaagcaagtgagacccctggtggggtggcagttcgtgtatagactggccagcccagccagttccagtggtggatagtgttatcctcattgcaaatttcagcgcgataattgaactcatcaagttctggttggggactggccagctgtaaattttgaactggctccgtggtcgaggcggaatttgggatatcgagcgactgattaagttcgactggctgcggggagtcaataatttcattggaagacatggtaacggccatctcaggctgatggtccatggcgagagtggcctcagcattatcgaccgagtcggatgtctcgcggtgcaagaggtgagcatatgaatcgtcctataggtatatcacagtcagttcctaaggttccaaagaggtagaggagccggcagtgggaataaataccagtgcgacggctatgatgggaccgttggttgtagcgggaggttcattatcaatagccaggtatttggtgtccatggcggtgtcattttcatcatcctccaaacagtcttgatgaacaggaggtttggaatacttgtcgtcctatagtgtagccattgtcagtgtctgtgtctgaaagtgggctggaagcggatggtagataccagtttgctagtggtagcagggctgctaggaatcgtagccaaatcgatgcccatagcaatataattctctacatcctccaaccgatcaaattgttcgtgctcgagaaggtgggcatatttgtcgtcctatatagtgtaaagattgtcagtatataattccgaagtcgatatgtgagaaagaagtgggaatcaatactacatttctgtcgatggcagggccaatggaagctgtagccatgttctcggtgtcgggagtggggatgacgagggctttggtcttcatagcaatgtcatcctcattgtcctccaaccagttaaactgcccccgagtaagaagaggggaatatttatcaacctaatggtgtagcaactgccagtaggtatgtgtgatggaagtgggtatacataccagttcagtggcggtgatagggacggtaggagttgtagggatggcttgtgtcttcatagcgatgtcgttctccacgtcctcccaccagtcgaatggttcacacacaaggaggttggcgtatggatcagcctagatagtgtagccgtcgttagtacctaatcctttgaagcaatagaccgactaggatagggcaaaataccataataaactctcccattagggcttagataaattgatgaattgaagtggagatggaatagttggtagatgaagataagttcttgatgagatgatgaagagtatgaaggaagaaggaagcagatataattgctgaggatgccttttatactgcaataagcaaccccaaataggaacggcctcgaggatggtctttgctctagacaaacattaatctaaagtgtttcgtctgatctataactaccgcacattcacgagtctgtctcttgttatagcacgcccagcacgtacacaaggttgggatccattggccgtagaataaagtaggaaatagttcccccattggtgaaatttcagccgtctatgccttaagtcaaaaaatgaacaggacttaagtatattagatgaaagtccggagctaaaagagctatttcataccatagagtgaagcctctacgccgtcactgcctgtgaacacctaaactcagagacaagatttgtttacatgggtgatggtagagataaaggccagaaccgtgttctatctctactatttccgaagctaatacggttgaaccatttccaagtccataagtgtcggtcagttattaggttacttcaattgactttcagtgttttggattgctaaacttaatttcgaaagaacatcattatttctagcgttgtcaaatttatagagagtaagtagtgttcacagaacgtatctaaatcctttgttgtcgatctcagttttgtccttgggagatatgagttagcttatatcgaggcttcatggggcttgacactcaccagcatgccattttcaacaccttctgcctcaacctcctggccattgattgcttcgcggtctcgacgcttgttctcgaggtacatgtaaatatacaaagcgacaatacaggccagctttactgagtagccagcgagcatcctgtataaacccagtcaatcaaagcttttgcacaaggatgaatagcaacatacgcaatataagcactgctgtacccaggggcttcactggacttgaaagtctgaggtccaatgatgtttcccacgcagtatccagtgaacaatagggcacctgtcacttgctttttagtgtatccagcaatgttggagctaacaattgtcagactcatgctgaatcccaagccttggaaatagcatagccaaagcgcaacaaggcggccccatttgttactgctaggcagtccgacaaggagacccgctccaagaatacagatcgtgcaggcaaagatcatgcatgtaaatcttgaatggaatttgccatcgaactttgttgcaatataacctccgagaaggagagagacgaactgaacagcaccgcccgggatttgaagatattgagttccgagcgtatcaaatccgaaagtgccgacgatgatggaagtaaactgttttagttattagcttcgtttacatccaattataggaagacatacactggtcaacgccgagtttgggacttgtgcaccaatcgccataatgaacaaaagccaggtcttcggatcctgagccgcttgtcggacttgataccatttgaactgactacttttgacaccttggcggttgatggcaacacgctcgacggctatggcgcgctcacgctcgctgagaaatttggcagttgacggaagatcggggagaagtatcagggcaaaaactcctgtcgcgatggagaaagctccaaaaatgaggaatacatacatccatcgtggaagtccagtggtgatatgtccgaccgcatagccaataagactataattgattagctttcagtcttgattccaatgtagtttcatagaggtgggtggttggtcgtcacttaccctccgaacatcgtcgcgataccattagtgcagtaccatgacgctaatcgcaggggttgttcttcggatgtgtaccacatgccggtcataagaacaaatccaggagttacaactgcttcgatcattcctaacaggaagcggttgattgcgattccagcaaagttgtagcatgcaggtgtcgtcatgagcaagccgccccatactgtttctcttagcatggttcttgagtacacattcctagtcctcataggatatttcttacctaatgttgtaatcgcaaggaacttgccgacgggcagcttttgcaatgctagccctgcagggtattgcgcaatgaggtatccgaagtagaaaatggagcctggtcagattagtgatttgcattataagttttcagaaccgaagactcactgagccatgagtattgttgtccttttaagtgtgtcccttgctttaaaccgtagacagacgcaaagttgatgctgttcttgtccagatactgcatgagattagtacttggattgcaatgagcgagacatgcgaatttcccacctgcagcatgtaaattaagaacagtgatggaatgaggcgtatatcgatcttgcgcagaaccttcttggcctcctgtgctgtgtattcgagaccgtgatgttgtttataaaattcatagttctcgtcccgttctgatgaggtggttgatgagataggaggcgataccgacacttcggcttctttttgcgaggccatgctgtcgatttttctcggtctctcgaactcaaaaggttaaagatagattaaaagacgggacgaggtagagttttataaaaccgcacgcttgactggcagcacggtccatgtggaggattacacaataataataggagccacggcctacaacatacgcaaccccagggagttctatggacatagtggggatataagattccagctagtctccaagggggttattatgcgatgagacagaatggtttctgacaggggtgcaagtgatatctaaaatgtcgatagatgccttgacgggcaacttgggtgtttcgagtagctaacttaaacagcactgatctcgaggctctattctacctaaatgcatcagatactgtctttagaaaagtgacgaggtgggtggagccattcatgtatcacgacatcgccgccgcaattgcgcgtttctcgggccgtatgatcaacttctatctatttagaatcctgtcgcaattggcttgacactcggggctttgccgtgcccattggatcatcatttggagaaacaagaaaatcctgcaacaaatcagtttaggttcaaaatctagttctttgcagaatctgagcggggtccatagaatatacgtttggcttggcacacgtgctgcgtcgagttcaatttgagatcttgcgtattatgcaagtcattcttcaaattagacccataaatcccttctatcccattaaatgcccttacacctaaacatgttggacgttaatataagaacgaacggattccggggaacaaacctcggaaaccaggggccttgattatataatcattcccgacaactcctgcggcccctacgtcatatatatctttctagacactatttcctctgattcctgtcattagttcattgaagtcttgcttaattgtttttgtacatcttaaagagagtgttaaccacctggcaaaatgggatgcatgaatttgtatgttgtatggcgccaaaagcttcttgttcatagggttatcgggtcgggctattccgtgccggcggtctaaatccaggccaggccccaataactatggtcccttcgcaggcggtgatcactaacatggtctcttcttggttttacaatgcaaaactatggcttctctgatcaaatgggccaaggtagtatttagaagagccccttcacctcctcttcgctttccaaccagcgggtttgaaacaatcagtccatcttaaaccctcgaagaagaacggtttgaagggttcaaaaaggggcactactatcctcctaacattggcgatatcctgcgacagaagtaccaagcaccggaagccatgctaaaggcagaatggagctatcggattgatatatggaacgatggtgttatggtaagctcttatcgtgttgtcatgtcctgatactaggttcaatacttcatcactacgagaaactaggcgtgggacctatttgagggcaaggacttgtttaatggggacgatcccgataggaaagggtattccacgcgtgcgcatcttgctgaagtcatcgcaattctaggcccgcctcctttgactttaatcaggcgcgggacgcgaagccctgagttcttctctaaagatggtatgtcatccatgatatgattctagtagactgaacaaaagatttcattgcatgcggcttataatattatcccacggggcattggagaaatgatcttgagatccggaaagatgcgtccttgcacaagtcagaagaatttctgagtggccgaaataaagagatgttcttggaattcatgaaggatatgcttcaatggaaaccagaagatagaataacggccaaggaactattacaggatccttggctaaatggccgttcgaactaggtcagagaaacaatctggcgttggattatatttttcactggggtcgtgtcaacaagaattagcactataaattcttctggtatttcaacttcttgagatcatcaacatcgtcaacccggacgcgcgacttgcagacttcaagattgaccagtatcaacttgtacacattccaaatgtccgatcactttgttaccacgtgctgaacaacgagttcatttctcaatcaaaactcgccagggccctttccgaaaaagctgcctttggggactgtcaaccagggaacggacttagaatcggccgtattggatcccactgtattaccccaccagttgaaactgacagcgtggtagcccaacgcgaagaaaatgatgatggtcgcaatagcagttccggtatccatggctgcttgcagcaaatctacccacgtcttgaattagcgacttattctcaggagtggaaacttgacgaggtaggatctcacagttgtaacgcttccaccagtcaaatgcacgcttgcggatgatatagttgaaaatgaaaccgaagatgaaccagagggaatattgagctatttggtcagatcgagtaatcctaccacgaaactttggagagacatactagtgtttgctggaggaatattacccgccgcattaaagaaaatcgggacattgatgtagcgaacccagctgttgggatagcggcggtaaataaggtacacaagtgtagtaacaacgggctggagagtcagtaaactgcagtaatatcaaagtgtttgagaacttaccccgataaggaagaagtatacaaggccattgtacacttgtccagactggaacattcgctgcggaccaatagtgccccatattaaggaagcattgtacatcactttagcaccgttgcatgtgaagcgttgtttgtttgttggttcgcaaaggtcagtaatatgtccaaacatccatcgtaagactgttgtcgtcagctcaaaatgtaacacagatttgacaaaacatcatacctccagtctgagttgctgtcgctagaatactagcgtagatctggccaaagaacagaacacgcggaggaattttctaaataattagcaaaggtcgaccaagagagtacaaaacaggcataccatgtattgcccgagcttcaaatcctgagcaaaatccatgccgtgtttcactgcattatagccgtagcatttcaccatcagattagcgataggcttcccgggccaagcgtatccggcaatcatctccgttatgatattgaggaacacgcgctggttggttgttccttgcagaataccctcgggaacgatcagaagcattgccaatccgaaacaaaccacaataaagccccagaccggcagctccgtatcccagtatttggttgtcaagataccaagtcccaacaccaccaccgtgagaactccgtaccaccattctggaacctctttatattggcgcatcaatcggcgatgaatatcttcacctccatgtcgtgcattcttaaacctttcccaaatctcggtaccattgtaaaggtatgtatgcacaacgattgcagtaaccgcagcgaaagacagtccataggtcagagaataggacattgagatgtacatgggagagtactccttatacttgctctcgctgaagtccaaggctgagttgagcacacgagatacattgtaggattgtcccgtgttatcgaaagtgctggacgagaggagagggaggctacaacatcagcatattggaatcccctcaatcagactggaaacttactatgcgctgtaccacacattagagtagtacagaatcggcgataagaaaaggtaaaagaacacaacaaccgcaaaagcattgcatgtgatgtagaagggggtcatcagggggtaaccagcgtagtttatttgtgtccagtcgatactgataggtatcaaacctaatccggaattcatctaagcaaaacgagattagtttcatgtagtgattgccaaaattcatgcgagcttactccgaatatcgtgttgaccttctgattatcaggcgcaatccacgtcacaaaggcgaaagcgctcaaactcgtccagatgtagtcggggaaccagaataggacaaatgcaaatgccgtaatgtaggcaaagaagcgataacgagtaatagtccaaccattggctgacgtacggctttctggctcatgtagtgctcggaaaagaacagtggatgacagtgaagtaggccaaaccaaggcagcagggtacacaatccaacggcgggtaagacctgtcagaccaaacctgtgaatgatcagtgactgaataggatagaggaatcaggatgcacatacccaatcatctgtgtcgtcaaaaggtacaggaatgagaagccagctccgaggtcccggttccaatatacgggactgacgatcgctaccaaggcaccttgcgcgtaagcagtggtagcactgatattgacacactgttttgatttgttagatataattcataagaatgtgaaactttgcttatgctcacaataacaatgaacgcgtgctccttgattgtaaattttcctgggttgacatcgaacgaaagttttcctagaggtaccctccacctcggaagcttttcccatgctcttccaatcgggaaaacgaggatttgagcgacaacatatcctattgtgagggaaggctaggagatgttagtaaataccaagtggagttaattgaaacatacatatcgtaggccgaagaattgattcactccggagaaaaggatgacaaaaacggtcatcaatatccaggcccgaacagctgtgataaagagttagttcagccaaaccgagaaagttaatgacttactattgcaggcgatggtgggatcatctttgttggacacacaagccgcaacctccggaactaagaagtgttaaaatcggctgttgggatatatgggtcaacctacaaggtgactggtccccctccacactccatttgaaggcttcgactggtgtgagctctgtgagttctgctctgtcggatttgtacagccactctcccggatcttgattagtgttctcggattcgagatctgccgctggtacttccgatatattcagatctttggcaagatctttagagctcgccatagctgaaatacgtttgaccggatgtgcacaaaagaaaagtgatgttatgagagataaaaaaagacaggacgctgatttcttaatatttgtctgcagctggcaggacgcagatgtgacgatagatccactcaaaatggcaacaagttccttccaatatagtgacaatgccaaagcgctgaagctagtccaaatccatagggttcaaatggttttattatctcagttatcatgaacctaactggttagttacccagttatctacaacatatgttgtacggacacttgccgagacacctgctgacgcaaggcagcaaggccccgtgcggggatacgacgcattgacctagctaggggttagtcttatacattaaagagattccaccgtctgtatgagaaatattgtgattccaagtagtgtgatactagtggcaacggaggaataacattgtaaaaagtgacccataactggaaaagggtacttgtagaaatgctctttttcgttacaactcagtcaagacatgccaagtacaccaacaggcacatcttcggtgtgacttcggtgtgggaagagcttaaattatggatggcgtgccgaggcgggttgatgagcttatccccactccgtaacctctaaattgaccgcctttataaaccgctttccaatcaagtatacaatgccgtagtaagtcacatgagttttaaaccggcagaaccggcagaattaaaagggcggtgaacttgtttgagttccttcaccaatattgcggaggttccagtgcctttagattcaacgctagaccaatcaaagcagcacgatagctgctgattggattcgaggaaatggtgtcattattggggaaatttacccatagtccaatataggaatgtgtcatttacgagggaaacgatatgatattctgacgaaagaagtactacaagaagagcaccatttgtaggattgatacttccaatagaaccttggaatattcggcttgcagctttaaattcagagttatccgtggtagaccagcgatcggacataaccttggctagtgcgccattaaatgcgattcacccatgctaactactgtagcctattccggcggagaaatccgaaaggtaaatatagtacctatttcggaggagagttacttactccactaatgtgtcctgttaagtccgatagcagtgactctcacgaagatatatcttcattctagtcagtgagtgatatatgtcatccaggcaaacatgctcgcaggatcgagaaacattcgccttctaggattgcagcttggagacaggaagttcgataacataggaagtcgtctggatatatctagttccattcatgtactaaacatcaacgacgctatcttccggtgccaaaggaggccgactagctgccatattacattgtctgaacacgcgcacctcatcctcctcaaaagaaccaacaatcgaatgcatcacaccatgattgttgaaaagcaccagatcgccctcctcccagtcatgggtatacaagtagcaaggatcaatggcctgtctttgcatcttgtacagccgttctcgaatctccgtgagattatccagcacctgcccgttctcgagatggattttccgcacacatgttgggtaaaccatcattgcgatcttgccagtaacagggttcttccaagccatggggtacaccctgatcttagaagcctcaaaaggaggcaactggtcttcggccagctccaacccttctgatataatccccaaaccattggagcgggacttggccttgctcatccagatgtatggatgaggtgcgtactcagccttgctggtgcggacgaaatgtttatcttcctccgacaacatctcataaaggcggtatccactgaaaaacgccgttgttccaaggggaacgtcaagtgtagtgtcggtgccatcgtcatagcggcagatctggcggcggcccctggggactttgacagccagcaacgtggtaaccaaaggcggatcaagattgtacatggccgagtcgatgtgccagcggtagaagtgtgtataaccgtgatcttcttcaggcgagatggggttcttgtggaatgtcttgtggtgtgggtgtttgaggcggatgtttgagagtccctcatactcttcgaccaagccgctgccgataacttggacttgtggttgatgagggatggttgtcaggtcagcatggaggacgctgcgcttgtcgattgattttccatgactataaacaccggcggaaggatcgaagcgtcgagtgagttcgtactgggcacgtggggagagtttgccttggcttttgatcacgacgacttgattctcatacaatgtccgacggagaaagtcaaagtcgtcatctaatatgaatcagaatttgaacccaataaagctgttttgagtattgcttacctgtcattgtttcaacatcgaagccggtgagttcagccccaaagtctacccgagaatcatcgggcttggtgacaggcttgcaagaaagagtcatggtagccattttgaataaatcagctgagataaatatcaggatgagaccaatatgaatactactgctgagcgaccgtacgtgctttatactgtttgtacatagtaccacaaggaccaatcaggacggtgcgggtgagatgctgcggctcacccgtcccagctcacccgtccacggagataggatcccaccattattgccaatccatcgagatgataatacaaaaagcattattcgttgagaaccgaacgttccgagacgttggtcttatcaaaaatggtggtacacatacgtggactcgtccgctctgctccattctcgtctctgcttaaaggcagcgttgtgctcaacgacgacaatatatccaacattacctgttgaaacgaatctgaacattgttcgaaaacacgaaatgcctgaatcaacaagtttgaccttcgacctcctctctgatgagatcagacaaagctccgccattggcgccgaagtccaactgcctccaggaatgcccttgctggatttggaccgcttgaccgacaacgacaaagatactctccgaaaagctcttttcgagaatcaagtcattgtcatcagaaaccaaaagggcattgaccctaccgtcttgccaaagctcgctaaggtttttgatcccgaagcatccgacgtccattccgcaggggagaaagctgtgagtgatcccaagaacatcttgtctgcatacaaagcaggacgaatccctagagcccaacaagttggaatcattggctcggggaagttccaggattacgaggggctgaaggagttggaggtggtgcatcttgttcgtgtcccccgtctgaccgacgtactaaactttcatttgactgaccagtgatacaggaccacacattgttccacgaggagcctctcagtcaagaggaattagatgatggctatactcgtccataccggtggcacatggatactcctttctatgagcgcctgccaggcgaagtgaccatcttgcactcaatccgcattcccaatgtgccggatcagaagatcaagttccctgatgggaaagagaagactgttggtgctggagccacggcttgtgagtttatcgaacaaatgcagataggtgcacacacttaccgaatacagtcttttctggcgctcgcgtattttcgttgttgacgccggaggaacaagagtttgctctgaataccacagtcacctatgctcctcaagcatacgagtatatccgccaatgcaaagcttccgacgatggcttgacgatcccgaactttggacgggaggtaccggtggaaaaattgtcggaatgggcgtggggcaaagtcgccgagcacccggtaggttgctattctgactgcacaccaatagtaatgagcatcggctgacaactttcatcagatggtttggcgaaacccgctgaatcccgaccggccattcttccaggtgcatgggtgttgcgtttacaaacttaccacgcggaacccagcgacgggcgagatcacggtaatggatgacgtcgagaaggtcagagaagtggtgtacaagatgcagagtaagatatatgccgctgagaacatctatgcccaccattggcaagagggtgatgtggtcattttccacaacaggggtgtaatgcacagcattactggccaactagccaagtacaaggaagaagaggacaagaggagattgctctggcaatgtacaatgacaagcacaactccccccaagcccttccgggaatacgagggagtcaacgacacgggttatgtgagggcataaattaagatgtaccaatggctagagtagctcaatgaaagaatggcttcgaacggctgtgaattttcgcttttctcaaaactgaagagggtcatgtagagtgtggaatgttccattgaaccatgcgtcaaaatcgatatcttccgctgtatcccacgccggctgcatttcgttaaaatgggcaccgatcacatcttgaggaccggaatttgagaatctgctaacagatgtgttagggctgtcaggacctaggttcattctcgtaaaagtcgagaacttagccagaatttgaccgaaatcgatggttttgttgccaagtcctggacccgaggctgcatcggccgtaaaaattgcatcgattaacgcaacgcctcgttgagcaagcacgtcattacttcgatcagcaaggcgggtgcgagccgcaactattgcgtccttgtggctttgagcaatagtggcttggttttctgcagttgcattaacctcaaagcacataatgaccgcagcggtaatcgcaaaggctgtatgggtccatatcgagatatccccttctcttacaattacctcgtgctcacgcaaaattgtcattgcagcggcaacacaggtacgtcttgaataggtatatgtctgatcattgaaagatcggaagaggaagggccgatgaatcatgataatcttctcggctgccgtgatagcgagacttcgtcgagcgatagccagccatgggatttgtgcttccttcgttttatccgcacgcaaaaggaaagagggtatggcttttacaatggccctcattttctggtctatatgcaggatgtgttcgtattgctctcgcataggctttctggatttcatcggaccgagtccgtcaactagaccgggcatcaattctgccaaagtcacgagcacacggatgtaagtgcttatagtgggagttgtgataggcatatcagtcaagtcataatcatctgcgttcatgggagggcctgtcgagaaatgcattggagatatactgtaggtgtcggtaaaaggaatagcgaaatggtcctgaatgatcatttggcaccataccctcttccccacttctcgttccactctttcatcccattcttctttgttttgagcaagtttcgttgattgatcctgaattttgtggatcccaaggcactcggcaatgcgcactgcagcattgaataaagtcgcgttcagctgactcaatccaagattatgagcgacctcggtcgatatgacgattgcttgaacagagtacacggagaggttgctgagaaaatgtgaattgtagagggtctgcaccatagcagagaacagctgatgtgtagattgtatcccctggaggtcgacatcaacactctcttttactttcgtactatcctggattgagctgacggtggaactcaagacagaaaggtagagtgctggccagagagggtcatcaaatttcccagtttcccagaataactcgcactgctcgagaaatgtcggaccatgaatacagttatgatgccaagccacatgacataaatgaaacttgatcagcttctgggcatctgtcgcattggggaaaaaagagcgcagctccggactaggatcatagactggaagaggactcgtccctgataaagattgaagtccatctttgcgatactggcacgagcacgtcctgtgagggaaacatccggcagaattacgaccccaagcaagatgttcaatagccgtgagaagggacgagtcaatttgatgtgatgtattttcagtcgaactgtgggacactttgccaagtgcatggttctcggttgtacttgattcccgttgtgtcgatgtggtgtcggatacctccgattctgccggatccatgccggtctccagccgaaatatttgatttttgatcttttgaatgacaagaggcactggatcagacggggctgattcgaggtccgccaaaagcgaatgtaaaaattgaatctctgacccatgttgcacagcgttgcgtctaagctgaacgatttctattgagcacttcagattcaagcgtttacatctcgaacagggattttgtttgtcgcatttgcgcttgcgcttcgtgcattctgtatcatgtcagtcgcctacgagacccgagtcgcagcagaggatcggcatttacctcggcaggcttgcggctgacgctgcgatacacggaccctggtcgcttgatttgacgcggtgtcattcattgcccgtcagccttgcatttgattgcctctattttgtcaatttgatgagttggataactccagacctagattttccgttggtactaggagaagtggaatgtgtgagagttgggggcgggagagtctgagacttggcactgataagcacttcgatcgatttgggcaactattaacccggggacatccacaacatcccgaggtcttaaatctcatcagttgttggtactttattcttgtgtatgttatccctctgtcgcttaaagtattgccacacggtgggaaatttggacttaagttttctacgaatccgttcccgcgccccagagatttcagtcggattttttcaaatcccgcaatccaaccagcggacttccttcgattttggaaaagtcatgagcatccaagcatgcctgtctagagttgaggaagctaggctcggctcgggcgaagacatcgttctcgtatgctgcgagagaggatagcaaggctttggaatcgaaggaactaattatggtaaaagcgatgattaacatgagtttaaacttggaggattggaggtgattagattcataccttggctggcgcatatcgacacgcgtgacgagatccaacacatcgacaatcgcgttattggcgccttctccgcggactagttgaagttagatatgcgcaatctatcacgctcgcgtaaacatacacatggtcattgtgtgagccgaatcacccatcaacaccgcccgaggatgcgcatgcgccctgcccaggctgaacatccagtcttccacgcgaatcgatcgcacttcgacatcgtggggaagcttttgcaccagcgatcgaaatggttccgaccaattatcagtcaacttcttcatgagcgcgaggcgctcggcattcgtgtctgggacagggattcccttcgaatccgcccaggagatgatgatttgacagtggtaacggtccttgctactattctcgaaattgtttggagtatccagaactatgaagacatcagcaacccgcagaagagaatagagggtttggcggacctacagctgaagaataaaaacacgttcgattcaggatgcgagccctgaaagatgaaaggatcgattgactcaacgccgcccatctcctcggcgctgtacaatgtcgaggcacctagaagctgcactggcaagtggttcatctgtacgttgggatagaggatctcgcggacacgcgaccgtgaaccatcgcatgcgaccagtagccgcccggtgtgagatgtgccatcctcgaagtgcgctgtgatttcatcggctgtagactcgatatttcgaaggtttttattccactgaaagcacggtgttagcgctatgatagtatgagaaagatgagatttcttccaagacgatcatatcaggacatacttgaacatccacgccggtactcagtaactgtcgcaagcgaacgcgactgacgcgaatgcgctccgcggcggggatattatataatgcgtctcccgacttgaggtcgaaaaactggaagcgaccgacgtcgccacgggcggaagcttctttgttgacgaaggtttccgggaaccgctcgaccaggtgctccggcaataattcacgcagggcggggagtgaccaatgcagcgtcaaaccccatccaccactacgggcatcaattgcggagtcgcgatcgaagatcttgaacgcgacatcatggcgctgaaggtactgggccagtacgaggccactgatgcctgcgccgataatcagaatgggagattcagacatggtgggcatgttacagtgcgcagttctagtagcactacgatttgattgcctctctatacaaccccggccctagtttactccgtaccgaatgagtcgtcccaccgcttggcaagtccgcaaagcccaatacgaaaagtatccggatccttctggggccaactaacccgaaaggacacaattaagattttatagggttccatcggcccctgggacggctcgggttccagctcgggcagatttatcaaagaaatggacttgcctaattaggagagaggccaggacaaagacatttattttacgtcatcctctatattactcaattaggattatagtttcgggcgatggtgttgccttgtgctagccagagttggtttaatgaagttacatcttaattggcaccggcgtcgtatccttgactcaatctactcatgtctcaggcgcatttccgcattgtacggagtacttgtacacgcgggatcttcggggtccaccgcccgagcgcgttgatcctgtggatcccgctttatttgggggcattattcggacaaccagtttgaatcagaaatcttcgagaaggatactgtcgcacggaaagcgatcgcagatttctcgagtcggctaataatgatggctattggcagagggcgagccggatgttgcaataacatggctatatattattgccactaagtcagccacaaaggcaaggggtgtagggattacggtgctagcgggaggggcaggcatgaaagaaaagaaaaaaaacatggatattaattaattcgaaattgcgtccaaagagtgttgaccggactccggacaaaaaccaaaatttgtgcgagttcgtcggcgggatcaagcttccttcctatttggttggcttgccctctaaagatactctatactcgatcgtcctctcgatacccccatgatcgggctcctgactagccaaaatgagctcctcgcttggtgttcgctttagctgtggacggccggaagcagttgactgcatgtgcgaatgccgatccttcgaccaattccccatcaagtagcctttgccttggctgtcatagtaataattcttgcttctgtcactggttggaccgagtcctcgcacgaagcctttgagtagaggtgccagatatggaatgcaagtgacaatgttctaatacacaaatcagccattgtctcacttaggtagtaagtagtcattttcacttacgcccacgttgaactcgatcgttccccataacacaagcattgttgagtttccatctccgaatgccacacgttgtatctgagttagccgcatgatcgagcagactgtggtgaagagaccgaggaggaaaaggcacacaacaccggccttctgtgcagttttgatattcaggctaaggagcaatgggatgggaagcacgatgatggtcacgtcggtgatgatggtgtaaatcgcgagaccgtagaacaggcctcccacgggaagacatgtgcctggtacatgggcgttccatgatcgtcggatctgttgcggccaaatgattatcagtgtgtggtcgcgtatgtccctcgtggggagagattcttaccggtgtgcaattgaacagcaggctcaaagcaccagcgatatgacccaacgtagacgccgcgatcacaatccagatcacaattcggtaaagacgctttgaggttccagagatcagccgcagatagctaaggcaaagcgaagccttgaaccctgcgatcccaatctggtaaaatggtcgtcctgcgtaattaatctagttgtctcttgtcagcttgccggtagaatgtaataagtgcaaggcatcaaactgaaagggagaagatattgaccttcgtatatgtagagtaatttgctgctggccgttgcttcaacggcagccctagcccatatcggctttctgcgatggtgagtatgtttcttgcagcaaaaggaaagctggaggtgcctacgagaaatgcagagtgcactgtatatcacactaaaagcctgctggaatcagtcgtatggtcccttgtatcacgcgcaggttactttaccatactaacaaccatcacatagtctgccgccgcccatcgactggctcgcgctcgaagaaaaagtcgcagggaaaccgtgcaaaccatcaaaatggtgagacttaaacatacacccagaatgagacggtactgcgaggcagcttcaatctcgggggaggcattatgtacccagcccattgctaagaaattgtgcgaagggatacaagggagagtatggacgaggacatagtcaagcgtctaccagggcaggcagatagatataccgaggtttctttcaccaaatcattacagcatacagtgataaaagtgaaagaaatgccaaaaatcaccattacattagactttctttggtggaaataagaccgataatgctagtcatgtaccctgtgctcctcgctccatttctccgtactctcccggccttgcagggttgtttacaatattattgtcctttagctcaccccttcataaacttcatgtaactcccaacacggaaaggtcctagggtcttggactattggttctgattcgttgctagttgtgaaacgtgtagccacgcgatccccacggtgattgcgacgttacttacacttttaccgcatcaatccattgtatttcccaccttttcccaccaccatttcttaaattccttttttttttcatttcccccccaacttccctattaactacgttcttccttgtcggttactcaattgttcccagctgcgatgggtgaaatccaacccgaggtagtagcacatccttccgcagatgagattgatgatgccgtggtatatcttaaaggccatgaaaaggaggcgctcgactctccagtcaatctgcgggcactgcgccgtaaaatcgatcgaagattgatcccttatatgttttgctgctatgtactgcaatttttggacaaggtcatgctgaacgtgagtttgactttcaattcagctgtctgggccatattcctaacgcaagggtgatttcgcacatgtacagtatgccgctgttatggggatcaaaaaagacttgggactcgtcggcaatgatttctccaacgtcgccacatggttcttcattgcctacttgatcgcggaggtacccaatggtgagtattatgatttatcttttgaccatcactgctaaccctcgattcacagtatatttcttacagaaagtaccgcctgccaaatggctcggtggaaatgttttcctctggggtgtcgcggctgccgcgtcttctggcgctcgggggtatcggagcctgctggcagcacgcattttcctaggcatttttgaagcgacagtgggaccatccttgatgcttattagcagccagtactacactcgaagcgaacaagcccctcggttcactgtgtggtatatgggtcttggtgtggcacagataattggtggtatcatatcttttgggttccagcatgtgcatcatgccttattagacagttggcggattatgtttcttgttcttggattggtgacgactgttgtcggcggtttaacctttttcttcatcccggatacaccgatgaaggcaacctggctgtctgataacgaaaaggtggcactccttcaacacgtcagcgaaaaccagactggagtctggagcgcaaatttgaacctgaaacaaattcgggaggccgtgctcgatattcagctgtggctcctaactgtgacaacaattctggtgtgtcgcacattccacctttcgcccccttgcttcaacatcccctgcagttctattgactaatactgcatagatatccgtgtcaagtggtgtggtgacgacatattcctcgacattgattgccggatttggtttctcgggtcccatctcggcgcttctcaacacgccgtcgggcatcgttagcatctttttcacacttctcgtcgggtttggcatccgcagaacttccaatcgctgggcatggaatatactctgtaccattcctggaatcatcggcgggggcttactatccttcctacccaaaagcaacaaagccggtgtgctgatcgggatttatcttgtcaacgcaattgtagctactcttccgattctataccagtggaccatggccaactgcgctggacataccaagcgtgcatttgctagcgcgcttgttgctgggtctttctcggtcggaaacatcattggtccacaaacattccagtcacacgatgcaccagaataccgaccggccaagattgctgttcttgcaactcaggctgcggctgctttactgtctgtcgtcctctttttctattacaagtggcaaaaccaccgcagagatcagactaagagcggtgttgatgcggcggaccagactcggtgggctgggctgactgataagcaaaatcattccttccgttacgtctactgaacatttgatggatcggggcttgaacatatactgtatataacaccgtttgcttactctgtttggctcaaaaggcatttccttggcctgccgtgagttttctggactaaatattcccgttattcgagatggaattggtagtcattgttcatagaagtcaaggcgactagccaatttctcgatgtgaatccatctctaccggtgctggctcggtgttgtcttgtatttcttcggtcggtttgaaataaaagccatagattgatagttaaatgtaaaaatgccattccgtaaatcggaaacacctaggtacttttttgacatgatattgacacacctcaagctaaagtatacactttgcctataatgaaaatagcaatctatcagtcatctggatgtccttcgtatctgcacgaatcccactgccatgtcgtctatacagtggcattcgagcctcttggcagctggtaagattagaactcgtccgataggttggggcgcatcctttggcttaggactgttgtatgtgacaagaagagcctgtcttcaatcaaaacttcaagttccaggttttcagacatggcgtcgagtactatgcacccatggtattgactcgatccctaatatgtaaacagattgttagctcacagaggaaatatccatggctgggcactggtcacaaagcccagatctgaccacgaaaggtgctatgtgtgagcaaataggccactccccttgaatcgaagtatgtagagatggacttcatgccagtcactatatcattgagtattgtagaggcgtcaatgtcgagttgttgaagtttctcaacatactaaaccagccgccatgggatcgatatagtgtaaacgtgcgtggatggtgtcactggttagatgaagcgtcagcatgcaaatagaatatgggaatacaggcaagtatggttcaacattcaaaagatggaaaagaaattggtacagcaaggaaagaagtgaagaagcataaggttcatgatagaatggagcaatgaatgtgggaaggtgaacatcggtagttggatgggacaaatgagctggagaagatgttgcgaaggagggaaatgaacatgatcggaaagaaggtaaagcctcagggataaaacaccgggggggagaagcatgaaactaacatagtatatcaataacatcgagaagaaggaacactgctgaatacgtgtaagagggaggaggaatagcatcaaggtaaaaagaaggaaggaagaaatatgtatagcatcaaaaaaaatccccattcatctagaccgttcctagacctcaggagaggagtatctcctccggccattctcctatatgcctccacaaaccgtccggaatacggcatccccccaagggtgggagcgcactaccaaacaccctagacacgtatgtctaggccgaaagcatgctttgtcgctgacccaagggtgtttgccttgcatactgaaatgcttgtagactttcttgagagctttagcacataggagtccgaaccgacagtggggagctaagcaatacccgttaaggccaaacgcccgttgagaacgcccctcgcaagggacgacccggtcatactaccgctgggccactggggggggctggttgtaatattggtgtttggattcttcatataggacaaaaccgtaaaaagatatgtcactagagaatgttagagcttcgactgctctaccttcctggcctcgtgatagattccgaaacgaaattatgagtctaggtagggccatgctgctatttgcaaagtttcaaattaattcgaacataggatggtggtggttgataaacactttgatagcagggtacatctattcgactcccaaaatcgaagctattcggacacctattttcggaaggaacgacgacaggatggatttctgaatttcaagatcctgcgttcgatccctggccatgtggaataatttgagaggtgcttttctatattttctggggtttccaccatcacaatagcccattcattttaccatcaaaacacctacccatcccacacagcgacaatgaagacacccgccaaggattacagaatacccacttgcccttcagaaacccgagatctgagttggcgagatctaaggcgagtttgaatatatgtaatagtattactatcaattattctcaacatcaacgtcagttcccatgacctttccgagacttttctccgccgtctcccactctttattaattacattgattacccagtcacccctgggtcggagtttgaatttgacctcctttggcattgtcatgaatcctgccacgaccatcgcccatggatccaccagttccccatcagcgggctcgatgtcaaacgcccacaggagacaagcaacatgcatgaaagatccatcggtagcgaccctctttccttggcagatccggcgaccctgcccaaagaccggcaacggaagatctgttcgtagtctttcctctccgccatcatcgcgttggagccaccgctcgggcacaaagtccccagtgtcgcctagcttgggatcaaataccttctcatctcgaccgatggcccacgcattggccatgagcgtgacgcctcttttaatcttgataccattgaactcgtcatcccggtccgccctacgaggaatggatcccggtgaaataggccgccaacggaaaagctcatgcataatagcgtcaataaaagcgagccccgaacgatccgagaacttggggaggcggtcgcgcccgacgacttcgtcgagcaaggcgtgcgctcgcgccatgaatgacggttggtgcagcgctgcaatgaacaaccacagcagctgccgcggtgaagtctccataccaccctgaatagatgttgcgagggtgaaagcgaggtcgagatcaggaacaccacctttggagtacttctccgctgtggcgatggcttgcttggtcgagttccagcctgctgagtccctcccatgccggaacaagcgcatatagaggtccacctgcgtggcgtacagcttatcggccgctctcttccagggtgacaaaaatgccggcaggtggcgcagaggcgggataatatccggaataccggggttcgcagcaagatgggttacctgggtttggatgtggatgatctcatgcaagatatgttcttcaaagcttgggatacgcatgccataatgcagagcaagtatgacactcgattgagtgcgctcaagcagtggatagatggtttctgtgctgattccttggggaaactgacgtgtagcatttgagagatcaaataataactgtttggactcgagctccatcaaaggatggtactgtggggcggcaagagcgccgagactgggcgctaggatacggtggtggaacttgaggtgatcatcgtagtcgtgcatcagagtaaattttgactgcccgggctcagctccggtgatcatttccatgctgacggagggcggacggttgctgtaccactgactacggcgactgaacaactccgttacagcctcatatgaattcaacaccacaatcggtatgagcccgaagagcttcggtactgcaacaggtccattctctttcgtccatgagtcccagttcaaaagcggtttatcaattggggagctatggagatcgccgattagaggaagcttgaggaggggtttattttcttcatccttttttcgtgtgacgatgtagagcagtgtcaacagacctaacaccaccgcaaccgtgataggagttgcagccataaggggtattggagtttacatatcagatgctctattgcggaggaaaaaggggacgcagtcttccatagcgcaaacatgtgcatattcggttactgtgccaagctttattatctctgttagacctcctgcaattggttttggaggccaaaacgcgctaagaaagcgatggactcgttgtgactgcataagcggcatttggcccaccaatgactgaggatcccggagactgtcggggagacttgtttctttcatcattgaacgtgacaatactcgtgttattgctagatctctcaacctcaatctgcgcagaatttaccaattactagttactcagttactacaattaatcataaaaattcaggttatctgatatcgatgttccgaaactagacgcattgtcgggcgattttggcccccacggctaccttggacatccctgctagttagctgcaggttggattcaaattacctatttaacatcgttctcctatttcgcttcgctgggttcccttcgacaatggagaatggtcgttaccttccctatagagacgccagcccaaaggcaggtcttgggcgtggctatcgctttctctatcctctctgtggcagcagtatgtctgcgactgctagctcaccatcttgcgcgtaaaaaatggacattgagtgactatttgataattgccgccggtgtgagtattcgcccaatcaactcgaacaatatctactatgctaaccaatacagattttagccgtcggtctccagtccattagcatcaccggcgtaattcaagcaggcatcggctacggccatgtcattacaattgcgggcacatatggaaccgagcccatcaccaaactccttcagctgatcgtcccattgcaatttctctgggttctgagtctcagctgtacaaagatttccatattatccttatatcttagcatcttccccgtcacttgggtcgtgcgaatctcttggataacaatgggtgtgattgtagcctggactattgggacaatcctggctggatgtctgatatgtcggcccttcgctttcaactgggaccagactattcccggaggatcgtgtggtaaccaggttacctcattcacggtgaccggagttatcaatcttattaccgatattgttgtgctggtgacacctatgcccctgctatataagttgcaaatggctaggtataagaaagtgacgtttatcacaatcttcggactgggaggcgtgtaagatttgcacaaccagtgaaagaaacacaagaggctcttgctgacctagaatatatgtatagcacatgtattatcagcatccttcgtatctccatgctctccacaatggacttcaccgacatcacctactcgattccccgtgccaacatcttcagtggtctggagccttgtctcgccgtcatcctcgcttcgatccctatgatgcggcccctcctagggcgttcaacatacacccccgaggtaacagcccacccgtcaaaaaagtcttcgcccccatctggaaggtctaggtctgctggcgatagtgagttccggccgcttcaggatgactcgagtgagctgtgtttacggccaatcgggccaaagcatgaggtcagcatcgcagttcaaaccctcccagagacgagagggataccccgtggaagcgaggactccttcgaagccggagagagcaggggtatggatcagatgcagaaaggaggctggattatttcagtaaagcaagaatgggctgtgttgcatgggcggaagtaatatcaagaccttccctagaaatttattgtatataccaaataaggaaatatatgtcttgctggtcaggcattcaattcaaaatgtcttctatggcaatgtcatagcgtagtctgcccagggactaggattcatatcttcactcccggcctcccctgtgggaatttggcttggggcctcaaccccgtgacggccagattcctctggcaggcagcttgtatcatcgttagccattgaactgaatttatctgggatggattcttactatctgctgtcatcttcgacaatgacttgttgccggtttagaagcctgggctgtgttagtgggagtgtctgtgtctgtggcatgatgttgggatatgagacagttgagtcaagatgagataggagtcaaggttgattgaaaatagagagtgaacgaggttaagttgagaagagagagcaaaggaggttagatagctgcctgtgtaggagcgtgttattattttgttcagagatctcccattgttagcgattatcttttattcttcacattcagccctctcatgtacacttcaagcgattccccagcactcagattcaatatcatcacaatcaaccatggagtcttcatccaaaacattccctgcacccgtgattggagaggatgaagaccagcctgggttctgggcacatagtgctctcaataacccatagcctcatgggcgacgagttcgtgaacgctcggggactttgctacatgcagtgcaagccgcaccacttcgtcgtgggccagccttacgcactttgaaaaattgggacgatttctattatttgggctccaaaatcattagaatcaatgcggtcaaatgtcatcggctaactttgacagaataatccaactggcagaataaatatagactaggcctaatctagctagacgatactctctattacgggggaagagcataaagagggaaacaaaggcaatggagggggaggggctcttgttcacgaccagatcaactcagctagttactaaagtagttgcttaagcagtttctcaagcagttttgcaagcagtttctcaagcagtttctcatgcagttgcttaggtagctgctaaattaattgacgatgtatcagttgattaagcagttaataatgatatgccaaaagggacttaattttattagtagtttacatacaaattgtaggtacctaggtgctatgaacgctaaacctaaatgggtcacttacgatataatgaacaaacatctcatcttctccaagcgcccggacaagccgaacagttgatgaaaaggagttcgcatcgatcgggggtagtgtaagcccaatgacactgtgcaacgaggcatatgcaagcatagaggccaagtcgcgaggtccaaatattggaataatcatgacgttctgcaatgcagaactaccagcgattaaactggcaagaacagatactacacttgatctaagccagaggcaaagagagctgaagaagaaagaaaagaagaagaagttctgggggcagggccaccttcttataggtatcctgagggcggtcggtttatgccactattcacaaataagacaaacaacgatataggctcgcttaatgtaaatggtaacgtgatgactaagacaatcactgttgatatagctggatgttctagctcacattctatagaatgctagcgatggaacaagatcaaaaagtaatgcgtctgcttgactatttgtttcaggaggaaatgatgcagtcgactgggaaaccatcccaaggttgcgcatagatatgcgctcggactacccaaaccgccacgccggagatacccaagatgcccaaggagctagatgagacacttgcaaagagatccttgctcgggcctcgcttttcttatggtcattcacataatcatgcggcgtcatactatatctatatcttacgccaatttttcggtttcttttccatcgccgggcaggacccttgttttgttttccttcccttcttaacacagacagatccccctcaggaactcatcttcctcaaacactcttgattctccttatgcacatggtgcctacttgtccaaatgactaaatacagcagaacagccaatgctgacggcagcgagaagaagccatcaggcataggtcttgctggttgatgtcatgaagaaaaggtagacaaggctctcctgcaaaggatggcaaaggagatcgagaccgctctggagaagtatccaacagttgccatttccagccttgagatcaaagatgtcgagaatgcgttgaatcttcatctggaccgaagagacaaagagcttgagcaggttactcctattactccccctccccccccccacgactcctaggtatggtattatcaagatcaaggtatcacagagctaacattttacagtggagtatctgaagttgatcgatgaagcatcgaaccatcgccctccacggaagtcagtgtgcgctggaccatcgacgccctgctacttaatgcccattcaatcgcagcaaagcgcacacctgttgcacgccctattaacgtccagagagatagctcgtacacgcatgggccggtacgattgaaggggaagttgataatgctctcggcacggacagactacggagtctggtacggtgaaactgaagaggttgctttgaatgttgtgattgtgaaagctaagaacatggattcggattcgggcgtagcgcaagccctaggctatatgggtaagtggtcgacaatatccattatagtaaaccacctgagcagggacgctaactgattcaataggctgcgtacaccgagagaggaagagtcttcataagcaggactgcaccatatacgggcttgtaaccaccggggagactttccgcttccttaagatttcaaatgactccaaggtacgtagttttaaattcgtgttagctattatctcatctaatatatatcagtggtcaacgtacgttttggatgtctattcgtgcagcctttccaggccatttggacttcttgtccacatattttgccgtgccgctgtgatgtcccctgcgcactcaaaggagagctcatgccaattccaccagcaagaggcatccgctgatagcgcccctcttgagaccgttgacaaggatgataaaatagaggactggtatgattagcttttatgtttagtgtagtgtcaattctacgcttttccattttcattttatggtgcctttttccatttgagcattgaagattatcgatagcttacgcttgtgtctgcggctcctggatgcttaaattatttcgtgttgctcagacctttcctggacctctactatgtataccaaataaggaaatacatgccttgctggccaggcatccagcttgtcattcgctctttccaacactgtggttggtccattgttctttccattcatattcctcgattgtttatactacattgtctcgcacctgcattggtttccaatttatagcctcgcgtgtcaacaaacctcttctactgaaaactatcttctccaaggaacgcttctcgagatctcttcggtaatctacatacagaatgttattcagatatcttctcgcgttggcgatccaactatgctgggttgctctcgggcttgctaaccaagacgcgacaattgtctgtttaccttccccaaaattaccatgataccaaagaaactaacaacagacagacgatcccatggatcacggatgcacctgattacttccagggctacgggggcaaggccataggcgccgtatgtatcctgtctgcctctcctgtgatacatcattgacaaccaatacagaaagatggaacaacaacctacggaatcaactgtctctcggaccaaacagcctgccacagatttactccagatctgaccgtcatctacggacccagcagtaagaacatagcagccctccaaataggacatcatactgacttatatatatagcatacgacatgattgccaacggctacagattcgacttcacctcgggatgcacgctgatgggctccccgacacccacaagcgcgtcatgcacagaaacaaagtccttgcacgaagctagctctatcacatcggccacagtggttgttccagccacgggcgacgattctaccctcggaattttcccagcaaccttgatcgtgacagacactggagacttccctgtgccttttaccgcgactgaaaccaaaccttctgccaattctcatgtttcaactagtgacgcaagtttgactgcaccttcgacagcgaccgcgaccgcaaccactgatcccctcagcttagcttcagttgggttcctgaattcgacagccatgacaactggtgcaccaacttatttcggcaatggcacctcgccggctgacaggaatggcacaacagttacggtgactgttcttgctagctctattccgtgtcactgtgaatgtgactgcagaggaattcagaccactaaggccactatcactgtcccaatagcgatgaaaaaccacggagtcaagacggctacgcccgtaggattgatgtgtggaatggtagttggcgtcatgttctggatttgaacttgagttgtcaatatgttcaccaacatggattttgccatttggatatcaaccacatgatgcggtggatttgaggaacagaatagtttgaatctgaggagttgatttacaattatccaatgtacaacataggaataaattccgccagggcttgttaaaaatagaaagatgcttggtaacgcattgataatccgcaatgcctctgctgattaatgagatcggagatttgtcaattccgtccgaggtgggcgcggcactctgattggctgtgattggccaatttactccgagatggagccctagagatggcgggatggagaaagtgatagaaaaacgacgtggatttatggatttatggatttagggattcgcaatccacattatgtataaagcccccatcccagctcacctgctatttttccttctcggaatcgctctataccacttcaccccgctcctaatccacctgtctaccctcaacaccttcaaaatgggctccactcaacccgaattcaagaacgcggctacctccactcttttcgagttggtgaaggctcgccgcacatactacgaccttaagggcgagagccccgtctctgacgatgtcattgatcgcattgttcaggacgccgttctccacgttcccagctctttcaacacccagacctcccgtgttgtcctcctgctgaaggaggagcacaagaaggtgtgggatatcgcccttaatgctctagagggtctggtcgctgctggccacgtccctaaggaaaccttcgagaattccaccaagcccaagctgaatgccttccgcgctgcctatggaactgtatggtcaccctccccaatatgacaccattccgtgtcaaaatggcgaatcaccagcttacccgttaacacaggtccttttctttgtcgactatgagtcgcttgctcctatcaaggagaaattcgcgatctacgccgacaagttcgacccctttgccctggagtcgaatgctatgtctcagtaccttggtatgtgctcttccccggcctttttgtagaaacaagtgggttggaaactaactatcaccaagtctggactgcacttcagtctgagggcttcggcgccaaccttcagcactacagccccctcatcgatgagcagattgccaagacttgggacatccccgcctcatggaagttggacgcccagctggtcttcggtgttcccaactctgggcccggtgagaaggccttcgctcctatcgagggccgctacaaggtgttcggcaaataagcacatatagatgcatgcatattaatttagcaatctagcaatctagcatttacgaatgaaagagcaatgacttggattttcggtttcaagacaattgtgcaaatctcaatagtaggccgcactacgtagtccaaccctacctcagcaaggaggatctgcatgctcgatatgacgtgtctgcatgtaaggtgatcctgatcaacaaagcttagtcgaacatccaacttcatagagtttgagaccctgaagatcaagtgcagatcagaagaaacctcacagaaacctcaatgatcgtcacatgggcaggcacaaccaggttcggctctggtaaaaaatccaggacctcgggggttgtgcctgattagtaagaatgtttagccaattaggaagcaggcgcatatttgacaccaccaggactccgtatacagcgctatagttaacaagatggctatttcccattagttagccttaaggatttacctactctagcttctgtttcacaatgccgagatttcgggtctctcgagctttttacgagtctccccgatcagctcgggaatagcggtctgacaataaccgaatattagcctgatgcaaggccccgtggtgtaccttcggccacggaattcatattccgccatgccgtgcatccgattggttgaaaaatctatagaaagagattgggcatcaagttatattatcaagtcaattgcagatgatcaaagctgacgacagtgatatacatatgattcgcaattcattctctagtggcatccagcattccaaacataatcccgagggtagatcttgtatcttgcaattgattgcggtattgtcatttttagatagaagcgaatagaggatctcaagggaattactatctgtaaaccttggtggctgagaagaaattgctagaaagaagtataactatgtcgacatgactatatacatacctgtcgttcttgaaacacaaagtagatccactatttaagagtatacgcaagcttccgcaagggattccgatcaccacgatgtcatgaaatatcgatgtgcaggaggtacattgtagattgtacgttgttgacatacatcgatcatcgtctataccttgtagtacaaagtaggtgcctgaccttatctttgtggataaaatcgaaaactccaccaactccactccatctgatcacaaatttagccgtttttcgccttcttctgaataatttttcttctcttcttcaacgcctcagatcactcatagtaaccttagaactatcgtgtctctgacaagttgaaaatgtcaaatgaaccgcatgcgggtgcagacccccaggccagcgggtctcaggatctaaatattacccctccacaaggccaagatggaggagactcagcgccagcatccagccggtcctcaatgtcctacacaaggacatactcaacaccggcaaccggggcacaaacccccgatccactgatgggccacaagatcgtggacaaaatcgccctccaagacctctccatcaatgatctcaaccgtgaaatcgagagctatgccctcgatacaacaggcaacatgaagaacagaaaacttccagactcggtatcccgacctcatcccggcaccgatgaagaatcgggatctccgattcgcagcaagcaaggcatcccacccgagctttcaagcttcacagccgaactggtcttgatcttcgtctgctcagtaggtctaatgctcttctccttcctactgggcgacgtgctcgcaccgcaagaacaaatcaaagcagccctgggcatcaccaacgccgagcttccctgggtcatcggcgccttcaacacagccaacggcctatcggtaatcatctccggctcgctaacagacctactgccaccaaagctcctgatggttggagccttcgcctggctcgccatatggaacctaatcggcgcattcagcctccagccctctcgctgcgtcctattcttcatcgtgcgcgccatgcagggtctctccatcggcgtcctcgtctcaggaagcatgagcatcctcggccgcgtctatacaccgggtattcgcaaaaaccgcgtgttctccgcaatggccgctaccgccccgctcgggttctccctcggcgcaatccaaggcggtgccttgtcccgtcacctcccgtggatctttggctcaaacgccattctctccgtgatcttgtgtgtggctgcctggctcgcgattccacccctccgacccatggcagatgcatccggtaaggaagccccgtcgatcaagcaattcgactacatcggcggcttctgcgcggccggcggctgcgtgtgccttttgttcgggctaacgcagggccccgtggcatcctggtccccttacacgtacgttttaatcatcgtgagctttgggctcttcatcgggctcttcttcgccgagcgcaatgcagttcgccctctcatccctaaccgcctctggcgcacaccgggcttcactccgttgatgatcgcgtacttccttggcttcgggtccttcttcggctgctggcagttctacgcaattcagttctggctgcgtatccaacacgctagtccgattattaccgcgctgtataatattcccaacgcgctagtcggtgtcctggcgacattgattgtcgcccgcactttacacctcgttccgggtcactatatttacgcggtatctatgctggccttcacgttaggaccggcgtttttcctgccgcagactgccaacaccagttactgggcgctttcgttcccgggtcttattctggtaacattcgggccggatcttgctttcgcggcggcttcaatcttcattactagtaatgttgaacggtcctatcaggggagtgcgggtgctttgttggtcaccaaccagaacctctcatcagcgattctgactagtgttgccgatgctattgggacccgtgttgataaaggcccgtctggggaaattggtcttgatgggctgcgtgctatttggtggtttggcctcgcggcgcagttgctcgctgcgttgatcacgattgtttgggtccgaattccgaaggaggaggagaaggagcacgttacttgatttaaatattaccttgtcattagatttagaaatacatgtcttagatcatgccttagatattaccccttccgctctaaaagccatatctaattttgcagtaataaaatcgtttcatcatactactagagctcgatatatgcaaataataaaaagaaagacttgtcatttagccacccgtcccctaaatatatacatcaaaatactgagcccaaaaagacatgttgccgccaaagtatgccgcctaaatgagatcgtaaatattaaacaaaaataaagaatacatgtatcgaaactaaagagaacaaaaaagcatcaagcatccataaccaccttatgctcactggtactattcttcggagttgcctcctgcataatactcatgctcatctcggtggtaacctcaataccgccgagcgaaatgtgactggagtggtcaccaagcttaacattgatcgaatacatctcatagtccttatcgtggttataagtaaacatctgagtatggtgtgtcagagcgcgagttcccgtgaggtttgtccctgcggatttattggcatagggattcgagctacctccggaaagcagtttagggaagatgcggctgatgataggtcgcaagaacgggagacaggcgcacatgatagcgacgttgcattctgcggcggtccaataggcggctgcaacgttgctgtctgttcggtaggttagcttgaggagtcgattggagaggacaagaagatgacatacaggaagtatcggggctttttgctacttcacgtaaactagataggcggagaatgctggtgactacaaccaagagacccatggcaaagacacccattaaggcgatcttctgcatgcggggcagctgtagcttggaaagtagcggcatcggcaagactagtagtgctatatcggttgcaatattcattgaagcattgaagaaccagacagcctcgaagctgagacagctgcctggcaagtccttgttccaaaattttgccacagggacacagtccacgaagccgctcacaatggcccacgacgagtaggcagccacgattgctatcatgacataacaggcgaggcgaaatcttttggcagggaagatgcgtagatattggaggagaatggagaatttgctgaatgccaagctggcattgtacatagggattgcagcccacaaacactgagaagaaagtcaggttatttacactaacaaagaaaagaagtgaagaataaagtgtaccttgagttgttgctgtaagacatgactggaaagtagtgccgagtggacacccattttataatgtagttctatcatctatattagtggggtggtttctgaattcacctctgcactatgaacgtacgggcagcgacgagtgcaagatagataatggaaaatgtctaaacatatgttttattagcgagctgatcatctaactccagacgtggcttcaagaggcataccaaagagaccagaatagcccaatcttcacggccagcaattttcatcaatccaaatcgtgcatacaatcgcattccgacaatgagaattgaaatggcggttaggactgccgttaccaccaatgcccgtcggccatgagaggccccaccatcatcatcctctcgaggaagcaatgtgtgaattgaaccgtgcatattaaatatcgaagtcaaggaccaaatatagcgagagtagttaaaatgagctcgtggctatttgcagttgggtcaattgatcatgtccagcaagcgtagtggcctcggatagatgcagctcactgcactaaaattgggatcgagagtgctagtaacgtgggtgatattcgaatagaaaacaatccttctcggagacagtcgcagagacagggagcagggacaaactcctttgagtatgttatccaagccaatcattgtctgcacaaagcgcggagaagcatttgcacgtggcattgcccaatctgggtagtcgattcataggaaacacccctatttcgagtagtttctctcaatagcgccacaccagccggcggtcctatgttccaatctaggtcgctagaaagctttagtcgatgaagcgataggtccagtatatgccgtgtaatgtgggggcttgtactctgcagacaaaacttccacacaagcgtttggcgcgggaacctggtcgccgaatctccgccataggcagggattcccgccgaacaatgttgcgaggggctcactgaaaggggtcaggattgacatgtgtctgctaattccgttataggaaaccccagctatcatttcaagtttcctcgttgggaatggaggttgagaacggggctctgtgtcggtacataggacccacttgggtgggtatacggtgcagatgtcactttcctgaagaaaatttagtgcaaggtggggttgcattggcgtagtgccgtcattctaatgatattgtgttgcaagccggatgacccgaggtcaggactggcagtgttgtattgcataggcatgaattgttgagacattctacgtgtattgcgagagccaaagtagagcatatgcattagaaacaattcatgatcgacattggacaaaggacctcggtacggagaaaaagggaaagaaagggagaagtaggatcgacagaggatctcccgcgccacttcctaatccggttagggtatgtcccctttattccaaggtcgctcctttattttgatctccagaactattcaagtcttgtacttcagtattcagtactccgtactccgtactccgtattctatactggaataattcatgatgttctgtttgtccattcactcgactgtttcctttgccatgagagatcatattacaagtcagccgtcagacatccatagatggcctcgggagtatcttcttttgcagtccctgagttgtgaaacaaagcaatgatcgccacagttcaataatgaagtggatgacctccacgcaaaagggtcatgaagcgaaccagcgcacagaacttgtcatgactttgcaaagtgactggctacggagtattatgtactgctagacgctgtccacagctgcgtcacttgcatattcgctgccttgggatattttgggatgcacggacaagctgattgaccaagaaagactacggattttgttcttgggtgcagtcccccggatacaatatacgattctggcgtcaacccatagttagaatatagaatatggccggtggaaaagttgtgaaacattcaaattgacgtttccgtatataccatgtgattcaatagaacggtaagcatctgaaggtggctagtcgagatctaccttatagattcattgtatcacaatcacttccacttcggaggctgaaaatcccagactggaacagtatttggccccgtctattgtggccatatatgtcatatccaatataccctctcaatctattctccagacagctcaacaacgacctccccttccctcccaagctccgcattaacagccgtccccaaatgcgcactgagctcgcggatcttatgactaacccatccatgatccgcatctccagaatccaacaaacgagcctgaaaccgctcaactcgcgtaggaaaaatctccaatctctccaacccaagcccactaccaccacccttctcccgaacaacaaccctccacaaagccccaagatcattcctatactccgtattcaaagcataatcatccacaaagtccccacaaccatagataataagcttcccacgataaacctccacgccctgaacatgatgcgacgaatgcccatgcacaatatcaaccccacactcatcaaccaagaaatgcgcaagcgacgtaacccgcgcatccggatgccaagcgtaattcggcccccagtgcaccgaaaacaccttcaacgcaggcttcgtcgcctcagcgccaacgagcatttcccgcagccgagcgcgcgtgtcgcgcgtgtagtcgaacagattgaatcccggcacactgatccatgcgtgcgggtggtcggtggctgagtatatatgcactgtgtggcggtgttggctttgttctatgggctctgaggccctgggcaaatataacactgcgggcttgcgcgcgccatcggctgtttcgcccgcgcctgcgtgggcgatattcgccgattgtagtgtttgtaaagtctctgtgagacccgatatgccgaagtcgagggtgtggttattggcgagactggcgtagtcgacaccgccggcgtgtaggatgggacctaggtttgctgggtgcatgcggtagttgaatgccttgttgggccatggggttggggctgttgtcacggctgtttcgaggttgatgcatgctagggtcgaggagtggaggatgcggagggctgtgccccatggcgaagtgggtgtgtagtttccttttgagaaaaaggttgggtgggcttctatgaaagttttgacgacgcgttcgtcctgctcgttggtgacgtgctttggcattagttggtcgatcaggcggccgagcattacgtcgcctgtgaaggtaagagtgaaggattttggagtggacatagtagagatggtcagtttgaagaattgaaattggaattgtttagagcgtattggatatatttccaattgagttgatcgaggttggatttggacattggatcattatgacatcggtcttcatgaagttcaagcatctacttgtaggcatttgaggaacacgtggaaatagatatcgttttcatattaaaatacaattcatttgacacacttttttaagaataataacacagccagggataggatatcccagtaacgtgagtggtatctttgtgcgccgttgatctcacgagaaacaccgattggcaaaacattatctgaatatcattattttcatcattgcttgggcggcgtcgaatctatcgtctcatctctgccagctcgcgctcctttgctctgagcatctcgcgcatctgctcagcttcgcgttcaagtcgggcacggcgatcaaccgagtctccaagagatgcaattccaggcaaaggctgtgacgggtgaggtgaaggggagatagaatggtgaataggaggtggacgtcccagattggtatccgagcgaggctcgccccgaacatctgattggttcagaatggacgagatagagctgagacgaccggggggagtaggattggccgaagacataatcggaggcagttggtttgatcctgcttccaatgtagatggagcgggtagagcctctgtcgcagtctcggccaatgttcgtttcttggggaggttgatggaatttggagaggcggaccgtcgcccgtactgaggcgcgggcgaatgtcccagccgctccacccccaaaggtttaggtaggccgtgagagatggagagaccatgtgcaagaggcacggatgaaacattgtaaccagtgaaatcaaccggcggtggcgcaaaatgtaaaactcgaggtgcgtcttcggattttccaggcatcatcgggtagtgatccgtaggctcgctgctcatatatcgatagtgatcatcatggccatgcgccagggcggcaggtgatgcctccggggatgccgatgagccattggaggaaagggtagcagcggtgggagactgatctcgtagggcgggaacaacccgtttgcgacgtttgatgatggactttttcatgttggtggggcgatagcatccatggagcttataatacaatcctgtcttgtgttagagaaatcagatcatcaagtctatatggaaactcaaacttaccacaagcgttgcaaatagggtggccctgttcatcgcgcctccacagaggagtcacagtggtgccgcaattttgacaagcaaccaatgtattagtgccatcggcagaagcaggggccttcaccggtggctcctcttgcgtcacaggctcaaggtcttgtgctgggttacggccccacgaagattggatggcagccgctccccggggggcggacttgtatatccggttgttgtatgccgggcatccatcgcatccttctgcgccaccggtgccattacaactcccaccgccagggcatgaccccttgcaacctccttccgaggaaccgccacagtgagaccgcataggaggcggtggcttctcggtaccttctgattgcatccgatttcgtttcgtggggcgagcgacattgcgagctttgaggtagagaccgcaggcgttgcagatcatggctcccgtgggagaacgacgccaaagaggagtactttttgtgccgcaattactgaataaaagagacggggtcagtctttatagcctaagtatcaaccgaggcccagtcgaaactcacctgcatgaatgccctagaaaagttgtgtctttttggctgccgggggatgttttctcgctcgggatttcgttgtgtccaatccattgatttgatccagattgacccgatccttgccccattccatcgtcccggtagtgatctgctagatgttcacgacctgcttgtgctgaggagatcaactgctgcgcagcatccaaatcctccgcggacggttgtcgcattggaacgtcctgattccggggtaaagagtgaagcgcttccatttgtgagatggacgctaacattacaggatgtgatccgggccaggaatccttcggccgtgagtctcagtacgggatgatcgaatatgaacgaaacgacaaaaacgaagggggtgataatcctaggatgtgagggcgatgtcgcaccacagtcgagagcagaatgcaccgtatcactcaaaaaccaaatgtcggtcaagctgacgggttggagaaatatgggaaagtcagtccagcaggcagatatgcagccacgatgctgcaggctcggggagtcgcagggcggacgatgactcgggatcgcggtcgaaaagaagtgaagtcggatgctgccaacctaggagtcaggaaatcgagtggtccgagtagatgaaagtagttgacccgccaccaaaaggtatggagcggcctgtatggaatagtggcgacccgacggcgtggaacagtcaggtgatggtgattgcgacaattgacagcacaccacagggcctggtctgactggcaggcgatcgtgggggacggtttcgttcggggacggtggcccgatgcaaaaggacgattagcgaggcagggattggctaaaagggtagggagctgcaagatggtgatcactccgcgtcactgcaagcgggcacacaagatgtgatgggagcgataaggggaagttcgagggatggaagagatgtcaaagataagtgggaaaccctaaaaaagattaaaaggaaaaggagagaacccgagaacaaagaggcgagaccgaattgcttatcgccgaggaaagggagggttggggtttatcgatctaaggtggaaggggaggatctacggcatatcaatctatcacactttatctatcgtttgccgaggatcgcatcaatctcatctaatcatgttctattttacggcgtacttttttgcctaggggattcgctatcctaatccccaaggaaatctctggcggttctgcatgattctatgttcccccaggattgcatgttgactccaccgtatggcctgatgaagtttagttggaaagtgaaaaattacagtggaaaaggtgggaaacggtggtaaaagtggaaagagtgggaattacacatccccaagtgaggttgcggtggagccctggtaggcaatcagatatgtagcgcctcggattggtcgcaagcggctgactaatcttgtcatcaacactctagcgattccgattggccgctcggagatggaacaagccgaagcgatgtggccacgctggactttgggatacggagtaaatctaggaccgtccgcggacgacaaaagtacaggcttggccccgaccacggagtaatacatcatcgtctccgtgtggtcggtacatatgccagtctccacagccaagaagtccctgcactagttcctttatttatcagatgatctctcaccggcttctccaataagaactcgatcaatcattactccgtagagcatgccaatgttgctagataatgctagcccacgtccaaatatagtacacgtgtctctgtccctttacgctggtatcaacaaaaatatccgagatccagcagaatcgcccattctcctcacattctctgctttataatgacatccttcgatcaaatcgagatcaaggacatcccaaggtcattgcgctcatcgaacatcgcataccacatgctggaggaactgccggaatagacagtatcccaccacagtgtcaatgcgacagaagatcgtcatcgccgcctactcgggcggcaatttagacctgctcggcaccccagccctggtcagattcgcgcatgttcgaaggaggctcgatagatggaatgaactccaacgcgacgtatccgagaccgatgaaggcaatcaccgaaccatcaatgatgcgcaacacgttgtcgtgcagcaggatggaaccgataaagatgtagactgttggcgcaagtgattagccaccgaattccccctcggatctgcagacatgcaaaggtctaacttacagacaccacggccgaggaatgagaagaggaacgacgcataacggtacgcgtagtccggaacgtgagggaggaactccagtccaccaacgactaggataatgttagccttgactattgacgttgcgagttcggattatcgtggggacctaccgagaccgaagacaactgcatacgcgcccaggatgaatgaactccaggtgccggtgaagaagttactgatgccaccgagcaccataaacacacccacggcgatgttgacaatacggctgcataggatcagtactggcgcaaatctatcatctctcacgaagagccaacatacaagatgtttgtgaaatccattgtgtgcttcgttgaagggtttatgagatgaaagtgatccttgggtgctcgcgaatcagtaatgcggagggcgggtcgttaggctgccaagtttcgacaaaggaagattcggtgtcgggtgactaaatcgggtcttcaaaggtgccaagttagctttgacgcgaatatagataccgcttggtctcgccaatcgctcaagtgatgacggaggtcagattcgctagagttcggaactcagtttgctggtttggtaacaaagggaaacgcacctttgagatggaagagtgggtctgagggaagctataataagcaacacacgtttgatcaaaaggctggctagtgtttgaatgaagcagaacaggggaaagtggaaatgagggcgtcgacagctgctgcgctgtcgcaagcagcgggtctgccaaggccactggtagctcacgtgatctggcaccggccagtgcgggtgctatgctgtattcggtatagtgtttccttgatttcttgacatcgggcacttaggtatcattgatacctcgaacggtggatgcgacttgatagtaaacgttaagattagtttataggatactggaaccccgagctagagaagtgaaatagggaagatccagagataaaatgcggcaggaagagagagagaaaacgacggagagttgaagaactaggaaaaccaccatatctactccctatttttcactagttagaacaagatggccaaaatgacattgcctttttatgttgcgagctcctgacaaatgtctagtaaagagatatcattatcttagattaagttctggaatacttgttcgtgagggaaagaccgatgattttgccattcttctcgttaagacccatggttatagtatgcattgtcaaagttcctcaatcacatcctgccttttctccagtcggacttcagagagaccattggcgaagcgactcatacgcacggggtcccgctctagcacattgtatattttacccaaatcagttccaatcccgatctcagcagcagtcttcaagctccgcgaatcgagacaaggagcaatgcttggccatatgccttgaacattgttgaaaaatacctcgactgccaaatcacccatgcccctgacctccttcagcaatattctagctttgtcgattttgccagctgcctgcttgaggagattatttaaatccccatctgtactcatacgacgtcagactccacttccacgtgcagtataactataacatcgcaaattcacccgcgcagatagaagcgaggacgtaccgtatctctcaacaaccagtttggcgagctcgccgagattggtggcgcactgctctcgataccggttgtaacttccttcttgcaggacctttgttcgatcttcccatgtgcttttggaaagtacgtcgatgtcatggtagtcggcttcaattagctttttgatcgttctctgtgtcaactcgtgcgagatgggccttgctttgatcatggcgtccagcaccatcgccaacactacctcggggctagcattttgtgggtcggcaagtactgtgccatgtagaggaggtacaccgaactcgttcaggattttgttaattttatctgctgcttctttggtcgtaggcgttgacattgtggagaaattgatgaaacgattataatggagttgaattattctcgggttgagtctcaaatcgagtgtttcaacaatcatcaattgacgtcatgatggcatgtacgggccaaccagactttgcaaaattacatgccgagactaaatttccgaacactgtacaacaattgatctatacaacgcgtttcctcacagcttagagcgagatatgttctgcaggacctccttgaccagagccacggcggtatatgcacagccgaaggaggcctggtagccaaatcctccatgaccatagttgtgaacgatggccacaccgtcaaccttgtctttttcaatgcgagtgccaccttctctcagcgggcgcaggccaacgccgtggcgaatgatatccaacccctcaattccctgtcccttcttaacgagatcggggcagatgtcgacgcaacgcttcatgatgcgattggcaaggttcatatctgggattccattccagttgtgcttctgataagagccaccgaggatcgtgccgccacctagaagcaataagccaacggtcgaacaataaaaccagcacatgagaacttacctgcagcacgagtcataatgtacaacgcctcatcttccccgtcgtcggtcccggatatcgacatcatggggccggggtcgttgcggactacgacgatctggccacgagcgggatacatcttgtcgtcgagaacaccaccgagagtctttgccgacaggccggtgcagttgaccaccacgtcagctttctgtccggtgtggtgggcattggctgcgtcggcgatatgcttgaagacagctcgtttgaacacggcgccgttcttgacgcactgaccgaccaaccacggcaggtagacggcggtgttgatacagacagatacgaattcctggccgttgtcaattccgggggccaattgatcagaagggaggtttttgaactatcatcatcatgtcagtctgcaggcagtctatggcaccatctcacggttcaaacatacatcaagcacgacatctttataccacgggtttggctgggtcaattccgagaaccaccttccggtgtctgtttcttgatccttcttccggttgtagatcaaggtgtctacattctgttagagggtctgcggatgctgatcaagttctgggccggtatcatacctcggaagtggatgccagcttctgggtacttctcggtgatttccttcaatgctggccaggtatcgcgctcccatttctgatgagcacttccctcttttcccaccctataaaacatccacttgatcagaactttatcgcgcagccggtttcagtcgatcatacggcatatagttggcaccggcccatggggacgcatattcaatatcatagtctccaggcatatgcttcgccaaaacagtaatcttgttggcggggtcttgcgacagcagatatgcggtggtcaaaccagacacaccggcgctgttacatccgttagtagaggctcgaagtgcggtccagtagaattggagctagagaacttgggaggttgatcttaccccagaaccacaatgttgttagtcataatggacaatttgacctggaagttcttaggaaaacacagcacaggtgactcgaaaggggcccgctgtccttaaatgtgggctaagacgagcggggtgaggggagagatagctggttgtcccattcagctgataagggttgccctccagggcaggtggacacccgtggaccgggtggtctgattacctcactttgtacttggccaattgcgggaagtgctaccggggcggtgtaagctttatccaatcacatgccaccaaaaaaaaaagaaataaacggcctgggaactttcagtggagacacggcggtcgaagatttaaaagacaactccgcacttatgcggaggtgatgtgctcctggtcaaagcattggaagcattgttgcaacggaaatctaaagctttgatcaatctcaatgcttttgtttctgaactctcttagacccttgatttagtcttaaggtatcagtgacttcgcctggaccccagcaaggagctccgtaaagtcccgctccatcactccggactccactccgatcgatcacatttgatcctagggctatatgccagggctcttcaattacctcaattcgtggtcagtgttctcgtaaatgactctaatttgagatattttcgagcaggaacacctggaagaagctttgttctgctaaatatagaatcgaatgccctgaagccttgctatacaaagaaacccgagcgatgtcatagtgggcaaacgcctagttgtggccaatcactgagcattagggctcaccgccccgcccccaacactgaaatgggcatcgaagggccgaacaatttcctttttcaaaccacccgcagggcccgaattcactcggcgggctccttttgtttgccattcttagatcaataacttcaatttttcaattttctccatcttctctcccttcttgatcggtctatttgtttagccattcctctatactcccataaatgccgacccttattcgagtgttccctccaatatgtcactcgtcactaatggtggcagaatcgtgcccatacttacgggctctgattctcgcgatcccaccctcgaggtgtctgcgttgttagacggatctcttcctcccatccctattactccaattccttccacaccgaccacgccccgcctgtcgcaggaccaacaagcttgcaaacaggtcaagcccgtgcaccatgcgagcttagaaatgccctctctccaacaaaggggcctttatgcaatccccacggagggagatggtaagccaattacacttgttgcatgatttttgagctctatagtggtctttggaagctgcaccgcgttgttttacttattctgacgcgtccaatcgcaggcaattgtctctattactccctctccgaccaactgtatggcgacacccaccatgcagacgaaattcgacagcttcttgccagtcacatggcttccaataaagattacttcatgcaatttgtcgttgctgaaggtggggagcgccgccgccctaaacgtgcggctgcctctgcgtatgctactcgatctgccgatgtctctgctccctccgaggaggacatggaacggcgattccaaggcatgattgctaccacccgtaagaacggggagtggggtagctccgagcatctccaggcattttgtcaggtcttcaaggtcgacttgaatgtatacaccatggatggtgtttcggtgttccaggatgtcaatgccctcccaaatcaatatcgggatgttctgcacgtagccttccatgtaagtgccttgctgttgtacatgtcatcgagcgtcgtacaatgtcatcaagccactaacgagcacaggacttcaagcactactcttcagtgcggggtatcgagggcaagcatgaagggcttcttaccaagctaaaccctctccagcccttcgaggagggaatcaagtccgaggtcgttccagactccaaagccgacttcgatcatgaacaattctcttcacaggaggaaaaagccgttgatagttatacaaccaacgatgctagccttgctgttgacctatatcctccttgggatatcaaaactatccaagaaggattgggtggccgatatgaccgggagaccattgtgaacatgctccaaagatgtcgtggtgacattgaccgtgcattcgccgcgctcctagacgagaagacagacgtcctatctgataggaaagctgcccccggaattcctatcaaaccaagcttgcaggcctcacgctcttcttctccattcagcacgggtagcaagcggtccgcagaagacagcgacgactctgaagatcctcgtcccgcgcgacgcacccgacctaagaaacggctcctttccaatcttaccttaggcgttggtatctcattcagggatgattatgacgaggttgtctccttgaatcttcgagtaagttctccaaccaaaggtttccatatgggatatttactgacgtttcgttcaatagatgaactccgacactgaagacagtcaggccacagaccgcactcccccgggtaacactaacccggaacaaccggacatgggcgagaagaaatgtcgtcgcagtagacgactttcccgcccgcgctcgagctgatttatttgtttcttgccattctctggctagacctttgagcatctttagcgctttctcttgcatcgaaaaaaaaaaaacggcgttagtgatgaagcgattagtttcttgggtttgcatattgcatagccctgcggggctcgcggcctatgggcttgcggaaggaggcgttttgtctgattatgaattccatggggtttttgcctggggcactcctcaacgatcttatttataacgataccagggtttctttctccccacttcttttagagtccttagctttagctctttttcggctctcttgtttcagtctgggtattggcccatatccagcgtcggtggcgagctgttttcacagctctgtttggtggcttggattattatacagctattcaatgtcacacccactttctggctggactctgtcggtcgtactcattccctaggcccttcctagtgatatagtgaatataggtgtaactcatactttggataggttttactccatgtaacagaacggacctaattatcattctaaaataccacttcaccgcctatcactatgtacatgtatgtatgtaggtattgcgaggccgtcgtctctaatgacattcaatttactatcctagtgcgtgtcatgtacatgaagatatatttatttgatactagtctaaaagaatgtctaaaagaacaccaagcaggattcggcagagagccgggcagaagccaaaacaaatctaatgcagttcgcttgtgttgcatgaaatatgtatgcgtgcctttagtcctccagtaggaacttcaggaacgccaccccaatggcgacaccatcatgttcaatattagctctgctcaaagcatcttgagcttgttcctccttgaaaacaccgccctcggcccgagtccggataatctccgtgatgatgtctcccgtgaattcaggatggccctgaagagtgataaagtggcgcggcacatacataccctgcactgcgcagcgcggggatgagcccagaggaaccacgttcgggggataattaaatacaatatcctgatgcatttgctggatgcgctatttgcgagaaggaaaggtcaggtcaagtgtctgcatatggactcgggtgcatgggtatgtatgtatgaagccttgtgttacacatgacgcaggcgcagggtactcacgatcttatctctcccaaacagctcctttcccttatcggtcaaatccatatcacacacggcaatctcccaaccttggtcgcttcgtccgaccttgctgtttaatgcgcggccaacgatttgatgtccgaagcagatcccgagtaggcggacccgatcctgcgagagaacttgttgagtgaattcgacgagacgattgatccagggaatgtcttcgaacgagttgtgttctggcttatggttactgtgattagtgtatgcattcaatgctctgggcctaccgtgtcaacacgcacttgatcctgttagaagcacggcatccacgtcttccagcttcgggtatttgtcgtcgttgactacatcccaagctgtaatttccagtcctgtttctgggtcgagtctttctggctcgttcaaggcgttgacactagctttgaggagcgcgcggaataccccgccatatccattatagcggcggttgatgctgtcaaggggagtgtcgcattccaagacggctatgcggagcgggggttgcattgttctggatgatttgaagctgcaaacaatgtgatacagttataaaacaaaaagatctagttactccgtagcaattggagaaagacgagacaatattcccttatcttatcggaccccgagatcggaccctgctgaccaaccacgctattcccgatgtggcaaacatctacaaagtatgagccttcagcggatcgcccttttttacccctcggcaatgcaattgatgctgtgttgcatcaaataaaaggatcttgcagccctagcgttggtataaatatcatatccccatacgcccggattttctctcttttttcccttatttttgtgtcaccactgctttcgaaacccatgagccgctgttgatggcgttcgctgtaattacattgcgtgcttgcagaatcttcgtcctcatgaaataacattttcatacatttgtcttcataaattttttttaaaaaatgcccagtgacaacgaggggcaatcatgtccctctgaagccacccctctcctgcgcaagaattcggtccatcggaaaacgagttatcacgatgtctcgtattctgcaacggatgttgaatcagtctgctcatacagagatacagaagaagaagaagccaacgttcgctgtatatccagtgcaagctctgccgaaggactcgatgttggtccggcttctggggctggctcgcccaaccaacagccgaacatctcaacccaagatgggaaggattacgcctcgagattcattgatatatcaccgacaaggttttggatcatctttagtggtatcatgatgggctacctgatcggcttctttgactcaacgctcatggcttcaagccatccagtcatcacctcctacttcgaagcagccaactcagcctcctggttatcgacggccttcttgttgacatcgaccgcatttatgccgctcttgggacgcatctctgacgcatttggccgaaagcctgtctatctcttctctatcgccatgttcttcctcacgacagcaggctgtggcttagcgcaaagtatcggcagtttcatcgctgcccgcgcgctgtgtgggcttggtgcgggtggtatcttctccattggtcagatcatctctagtgacttggtacgtctcgagtatcgcggtgtctaccaatcatacatcaatctgtgtctcggcatcggcggtagcctcggccttgcctttgggggttacctgtgtgatcatatcggctggcggggtgcgtttctcatccaactgcctttcatcttcgtttactttatagcagccgcttggacagtcccggcagatctcggcattaaacaaactggaatggagcgcatgaaagtctggcagttagtccggagcatcgatatactgggatcaatcatcttgattatatgtgtgactctgttgatcatgggtctgaacttcggaggcaatgtctatccttggagccatccactcattatcatctccctggtgtcatcgttagtcctagcggttatcttggtacgttacgagctgcacgttccacgacccgtgctaccaattgagctcatggcaacggatcctcgagctagtattatctttggcaatttctttgcctccatgtctgtacacaccatgctgttcaatgctccgctgtattttcaggcggtgaagctgaccagcccaactgcttctgggctacgccttgtggcctcctccatagctgtgactatctctagcgtgagcaccgggttcatgattaactggaccagacgtctcaaaccttatgtcatcatcggtgtatgttgtatggtgataggtggatgtgcagctgcatccatggggattgacacctctcaaccactctccatgatctgcatctcattctccagtctaggtcagggcttcgcatttcccagcttgatggtatctatcctcgccacgagcgagaaacaagatcaggccgtcgcaacaaccactctggggctgtggagaaaccttggcgccgtgatgggtgtggctgtcagcagctggatctttcagaacagtctcatataccagcttaacaaaaatgttactggttttgagaagaaccatatcattgcacttgtccgcaaatctgttgatactatcgctcacttggatccaatccatcggcgagaaggtgtgtctcatccccttggaatgccgatttgatttgctaataaccacccagtcactctatcatattccgccgctcttcaactgaccttcatatctgccgccttatgggcagtcattgtgttaatattgttgggtcgagtccgactaccgcggttggggagaaaggcctagacggtgtccctgagatggttcggtattttgacaccgaagattgcatattggcttcaaatctcagcatgtttcggataaaatgtgttataagtattttaattctgactgtatttgtttgagttgatataaattatgtatgcgtatactccgtactcaaccgtctccgtatatcggcgatcttggcaatgcgacccacctttttttcttgacttctttaacttgacatccacttctccgcaacttgagaagtctgtgtggctacataagcaaggggccagtgagtatttcatacggtactttcacacgaggaccataatcctcagctgacccttttttgccccaggattattcgccgatcccttcgttcctgcccctcctgtgccgccggctggtagattcaaatctacacctgaatatcagatcgaaatcctattctctctatctgaacctcctcttgccagtcaacaacgaatatggccatctggttagaacctacaacggcatattgtgtattcgggaagcctctatcagttgggactccagttggcgccggggactagaaacatagttgcgctcacaagagcaagagctatcgcaatcagcaatttatcaaggaaatatgaacctccgaaaagaagcggagacgcagccgcagtcgcccagcgccagcacgaggacatccactccaaaaagccaggcaagcgattcacaaagcacaccccgccgctccagtcgcaagaaatcctcagatgccccagataccaaagctaggagggtacgcacaggctgcctcacttgtcgccaaagacatttgaaatgcgacgaagccgtgggacgatgtctcaattgtcgcaaatcggatcgcatctgtcgacgtggtgtccgtctcaatttcattgatactcaaactgtggcgcctccacacatcatcgctcggccccacggatcgaaggtgacatttcgagatgactcgcgtttgatcgcgtctctgtatgtgggaggtttcgagatatacccacccgttcagccagagagtcctgttcaagagaaccaagattcgccacatgactttgactttataggggatgatgatttgacaaatctttttcaatcaatggcacattcgtttgacccgctgagctttgatatcccacacccaaatgcaacggactttgttggaagtgatacttggcaccagtctcacttggtaccaggagatgaacttcttccgcacgggacgtccaattttgcgcgaaaactggctgggaaacatgaatattatcctttcctcactgacccagagcaagtatctcttctcagaacattcatggaagaggtcggtccccgcctggatataatggatgaaatgaaccatgtgagtaaaattccccacattacattcttacaatctgctcacaaagcgcagttttcccagattcttccgggttttgccattagtgagcccatattgctcaaggcatttcttgcgtgtggtgcgagacatctttctattatagacccttcttacggggatgaaaaagcgacacattattatgacgcagctactcgggatcttctgaatgcggtacatgatcctaaccgtgactctgtactatgcgcaacagcggcccttgccctcggcttctccgaaaccatgcaaagccaatcaagccacagtggaaatcacagcgcaggctcccgggctttgatcagagaatgtggctggaatgccaaaacccctgggctgggtggagcatgtttcaggatcagcgtcggcgcagaactcctgaactgtatgcgatataattggacattgtcttgggatccaaatacatggggaatcgatatggacatggatcatccacaagccgcaaatggaggcaatcaagatctatggcatcatcggatactttatattttcgcgagagtcatgaccttcaaagcatcttcgcgcccatctcacggtgtggcgcgggctatccagctcaacgatcatgaatggatcactcacaacaggtggtgtgaccaatgggcgaaatccattcctagatcccttgtacctcttggtcatttgcagccatggcaaacaagttccaaatcggtctttcctgaagtttggtatgtcctcaattctcgcattcaacctgttcatcaactaatattcgtaggcttgtcaaccgatctgccattgtttctcaattattctaccacgcgactcgtattatgctggccaaaacacacccttttcagtcagagttcgatgacgatatgcgaaagatgcaacgcagccatgcgcacgaaatttgtggcattattgcctacaccacagatcggttagtacaaatcatgaccaaaattttagaaatatctgtctaaccagttgagcagaagtgtggcggatatatccctgtactttcttgtactcgctgcagagtgcttagaaacacgagaagcccaagaggaggtactcggcatctttgataccatcacgaaagtgacttgcagcagtgctgaaccaatcaaaaacgatctcaaacaaatttggagctgggccgaagctcacccacacatggtgacgccagcccagatgcacaaccacttctatgaattagacccatccctatcagtctccaatcacccggactcatctccaagtctacacaatcccttgttgactaggggtgacttctcattggagagccacccgtatcaaggatactatgtgccaccacatcaccaccatgcactcaatcagtatcactatgggtcatttgatctgatttgatgcttcaaacactttgacgaatcatgaattttattgtccaacttcacattcatactgcttatacccctgtgaatacaataacgctaggtttcgctaaaaaaaaagctccatggcagggctgttcccagctactttgggacattcactgtctattccagtattgcatgactaatatgaagcgttgtagacgattaaattagcatgtatctcagttgttgaatttagaaatggccaggaaggtggggtttaagaactgttaccatgtatagatatatatctgagatgtgatttattaacacaacaacttagcgactagagagaacgatgttggagaattatgacaccagctagctttgactgtggtcttgctgttgagcgcaatacttgccacaacagtcgctacctcgtggcttatgacttcatatttcatcttgctcggttcttaaataaacacccgatcataacgacgtatggttgccacaaactttgaattacgtactatatacgttgaacaattgcgcaaaaagtagcatggccaagctctggtctaaacgacaggttcgggactcttccgacaactggtatatttgaaggacgcctcatcctccttttcgtgaatattgcgttgaaaagtttgaaaattgcacacacacaacttactcagattacaatatgtcgaaccctgccgaaagaattgcagaagataattatgaaagagacaatgacccttcgcccgtgaccggaaccttcgcagatgactcttatgtcgaagagaccgatccaagcttgagagcacaagtccccgtccagggagatgaacagccatttgatgacccaatacaaccaccttattcaaattctgatcagcagcttggtaagtccatattgtatttcttggcaaatatccaagtatcagcgaactaatagcgtctatagagagagacgagaacgaagcaatcgataactctaatgtcctaaaaggagaccgtctccgtcatgcaaagcctagaacctcgaacaggtacaatgaggggccaggtgaacatgatctgccggctgagccttaagtgatttgcaattgttcttgatctatgaatttgtgcggatatcgaaacgcagtaatacaaaccagttgaatttcctcctgttaaagtatctaaaatctcgatgaaagtgtactctactatgctctgtaggtatgtagatatcaacaacattggaaatcgtccaagcgctaatcttcagggtgttggggttgataagacgtgctccagtcagaaagaagtggtgcgattgaagttatatggaggcttactacagcctggacctcgggagattgtgtatccctcaactatcgtataggaaccgagttaatctgatcggccccgggggaaagggcaaattaccgatgcgagggagtccgttcaagtttgccgaatcggtcgacgaaagttgcggtcataagtcgatatataactgcaattcacattattatcgagaaagaaaactggactaaaaacggaaaaaaaacaaagctccttggccagcctgttttctgcgtccctgtattctggaatataagaatataacccttttttctatcagtcatagccatccaacatagatatctaggtgttgtagcttatttgtaggtgaggctcaagtgtggcggtgtaggcaggcaattccacacacctctgccgaagatacaagagaatatatcaacaagcaacaaccacacggtatctgggatggacaccaaatcagttcaagctcaatctccagctaccccagtatacatacttcgtggacatgcttctccaattcatgccctgaacatctacagccagaatttacggcttgtatccggcgacgccaatggctggatcgtcgtttgggacctggtcaccaaacgccctgtgacggggtggaaggcccacgagggggctattttggaggcgagaggctttaatgttgacttaggtgcgactgagatttacacgtatgatgattcatccaccactacctagccctggaggtatcggctatcctactaacatctgcaatagacatggccgcgaccacaaactatgtgtgtggaagcttcgaccagaggatgaatctttccttgataaaacgcttccagtggatgtggctgagtccgcacagccagaaaataaaagccagccgtggttactccattccttgcccgtgaatgccctcaatttctgcgcattctcaatagcatttgtgaatgcggatggacttcctggagctccatccaaatctggaaaaccagagaatactctctttgcggtacccaatgccttagactcgggtggtgtcgatatttttcacctaccatctgaacgcaggatcagtactatcccatctgatcaatctatccaaactggaatgttgatggctgtaaatctcttcacgtcaccttctggggatctctacgtcgcctctgcatatgaagatggccatgtgatggtcttcgttcatcgtggagctctcaaatcggccagctttgagcgtgagtatattagcagcaaccctttgaaatgggacaagctttacgctggccaccctcattcccagccggttctttccatagatgtcgccccctcccatagatacttcatctcttcttctgcggattctctgatcgtcaagcatcccatccccagcatagggcctgcgggttatatccctactcctggctacaaagaagaatccccattgaagattgtcaacacaaagcattcgggtcagcagggtctgcagatcagatcggatggaaaggtatttgctactgctggctgggacggcaggatccgggtatactcggctaaaaccatgaaggagctggctgtgctgaagtggcacaaggatggttgttattctgtagcgtttggggacactgaaagcacgtcttcgttgatgtcttcatcgcctgagtctgcaagacaagaacctcgagatacagaccagggcgcagcaggacagacagtcatcgacgtacgcgactactctctcgcaacagtgcagcaacaacggaatcaaaaagtacaagaaactcattggctagcggctgggtccaaggacgggaagatttcattatgggatatctactgagataaatgctaatgctacaaaacaaccatgcgcccatgcttttttgagggagtccactgagcgaaaatcaagccaagttgaactcgttagctccagacatatgctccctcatcttggctctcatcttgcgagcagcctcgtccgtaacatttgttgaagatggatcgtcatcggcctttctcttattgcctgaaacaccgtttcgggctgccttgaagtcctttttggtgtcttcttgtccaggtcgcagaccggggacgttaattttacccggtcgatcgcgcagggcgaagctctttgcaagatgacctaagtgaagttccttaatgtcgaacatgcttcgctcagctgaggtgtgagtcgcgtaagctcgaacatgagattggaatgcccgtcgagccatttccagatattcagggttatcgagtgcccaacgctccacgtccatctgccaatcggtcgtcttctcctcccagttcttctttttgttgtcgttgccgccaaagccacgcttgagaatctcgtttgcatcagtgcgggtgagcgccttgcctccatcgcggtagccacgttttagtacttcaacatagttctcttcacagccaggctgaaggaagacgagggcacggccatctcgtccaacacgagcagtacgaccaatacgatgagtgtggtcatcagagctgaaggcagggtcgtattcgacaaccaagtccacgttgggcaaatccaaaccacgcgaagccacatcagtacagatcatgacacaagcctcagtactgcgagagaaagagccaagggtggcggttcgaacgttctggggaagtgagccgtgtagtcgatgcaagaggaccggattcgctggggtcgagaatgctctaccgagagcaatggtgccatggggtgacagtttttctttttcttcatctttttcatccttttcgtctttttcttctccgtcgctcttcctttgttgctcgcggtcttgattccttgagaatagctcaaaatggaaatcgactacgtcggcgcaagacatgaaaacaatcgccttcatcactgatccctttcgcatgaacgtcctcttcaagtaggctgttaatgaaaccagacgtagcttagctggaacaatcgcgtacgactgcttaagctgggcggggacacggaatgactcttcctcgtcctcatttggcttctcgtcgtcctcctcggacgggtcggctttgatgtgtaccgcatcctttaaactgatttctcctagtttttggacattcatctttagcgtagcagagcaaagaattgtcgtccggcgcgtgggcacaccgggaacgcggctcgggcgttgcctagcgtcaagtttcttgacaattccttgcagttcctcctcaaatcccatgtccatcaaacgatcaccctcgtcaagcacgagccaccgcacgttgctgacatccagcgcttccgtattgtcgagatgatctaccaatcgaccaggtgttgcgacaagaatgttcaatccttttctcagccgtgccttctctgatttttttttctctccaccaattaccgttccacaaacaagccagttcgcacaatgcaggatgttctccaacacgacggagatttgcttgcacagttcacgggtgggtgccaagataatagcgaataatccactgtctcggtggacttgggtatcgttatgttcgttcttcgcttttgagagatccataattcgctgcactagcggcagaagataagccagcgtctttccggaaccagtttcggcctggatgaaagcatcgctttcctccttcagcaattgtgtaattgagcttgtctggatagctgtcggcgccttaagttccagctttgtgagcagatgtgctgcgagattgggagacaggcccagattcgtgaaagtatccagtccgtcgatcagcggcgcattagtcggtttcgcgtcttctgcgtctctctcctccttgggtccttcgggattgcgcgcttcaggattgctactgaagagcgaggaaacaaaatggcggggatctcgtgggtgttgctgttgtcgtcgatcaccgccagagcgcggggcgctaggacgattgaacgagtctgagtcttccgtcctttgtcttttcacgggccgtgcaccgagttggatctggttcggattcttagatgctgcatttcgcgcagctgcatctccatctccgggttctttctcagatactcggtgggctgagcgcttctttgcggtgagtcggtctcgccatgttcctcccttgaacttagcctcaggcttgatgacactgtcgccaatgctaaagttcataagcattccatcgtccgccattttgaaatatggtgatcccctatgaaaatggggaggagttgtgaagatttttgttgaaccggcgatccaaaagctttcgagactttttttcggtgccaagacttccaggctctcaggcaaattttctccgccctaaggatttgccctactttgtttacgttgaactgcaaaaggtaaatggagatatatttgaatattttgatgtctatcttgcttttaagtaatgtatgtgagcggcttgcttccaaaccatgttatgctaaagtgttagatgttcattactgagtggtcgatatagtatcaagcacgaggatccaagatgatgttgtcgatcagtcgcacagggacctttccatcacccaatccacaagcttcgcctggcttagactcttccagcggtgccatcttgaatgcggtactcaaaaccgcacccttagccgggtcaacgacttccagctcgtcaagggtatcaggatcggcaagagaaatgtagtcgacctcgtaaagtgctctctcggatggcgaaagggacttttgtccggaaaagacggaatctgtcacattacgagcagctccaaggatatctgcccggctgttcttgccgcccagatatacttcttctgcggctttcagtgccttgtagatagtgagcccaacggttcgtctccggtcgcccaggtagacgtttcgtgagctcagcgccaggccatcaggttcacgcgtagttttaatgattcgcacttcggtaccaacatggaaatcctctaccatgcgcttgatgaccacagtctgctgcacatccttctggccaaagtagacacggtcgggggttgtgatgttgaaaagcttcatgcaaactgtcgccacacctcggaagaataccggacgagaagcgccctccagtttggtagccaacggagtaattgtgacaaacgaaccgtttccatcaacctccgacgacgggggaagaccagggtacataaccttcgaagtcggtgcgaaaatggcggtgatacgcccggcacttgcactgttttcgcccaaccgctcgagctcctcattcagcctttccaacttctcaacgtcagtatcccaggtgcggggatagctggacaaatcttccgtgactccgaattgtgtgggattgacgaagatgctgacgaaaatgtctgtgttctcgcgagcagcttgtcgaattaaggaaagatgaccctcatgaagtgcgcccatggtaggaacgaagcctacactccggttcttttgcaacaattggcgccggagtccccggatcgagggaacatcacgaaagacttgaaagctggatggtcggcgaacagattgcgaagccgcggtcgcgtcggcaaagagcgataaagccgtcactaggataaattgagcttatctggcgctagaatttccatgaaagagacatactcgaaaacgacctcgctccattgaccaagcgagacatcttgtgtgaggttaatgaacagaaaacgagcctgggatgagagctacgggcacatctcagtcaagcccacgtgacctgcctcggctgatctctggggaatccgagaaaacatccgggggcgatccgcgggctgattgccgcttgagagcttgggggttcaagctatgatttggtcccgcacttctcctctaagcttctcatttgactcctcctcttcttttctcccatggacctaactgctttctcgtgagctgacttgaagtataaccattctcgccctgcccccttctacaatgccgtctcctaagtcggctattgccgatgacaactcggcacccgatctagaaatcgtcaactcacagttgacaatacatccatccggcttcactggaggtccggaaacccaacatgaacaaatctccgaacgcaaccttgtcagcaacatggcgcgatttcgcgagaaccccttccactttctccgggaagtgagcctatacatgtccggcacgggatggcgtgcatatgacaaccctatcggtcaaccgatttactattctggcttttccgaaaagatgaagacctccatattgagcagcctactgctgcaaaacaagattactgaattggccaatcgtcgactcatggtcgaagagaaggaaggactgctagcaatcaatgaaggtgcaacgctggacgacaaacgggcccgtcgccggactgagattgaagataatcttcgagaagtcgtggacacaatgatggaaaacatgatttgcaagatggaaagcaaaagatttattcggggcgcttattatatgtgcacgcaacttttgactcgtgcttaccatcaaggtaaatattccctgctatactcattctatcgcaagtcaatgctaaacgatattcaccttaggcatccatgtatccagcgaagaagtcctacgtctaagatctgtagccgagactgctaccaagaagaagcagtccattgttttcctgccttgtcacaagtcccatgtggattacgtctcgctgcaactcatatgttaccgtctcggcatttctcttcctgtcatcgtcgcaggcgacaatctgaatatcccattgctgggccctttcttacaacacgcaggtccgttgcaagacaatttcctattagcttttagctagcactaacctgttttaggtgccatgtggattaggcgcagctttggaaatgatcccttgtataatactgtcgtacaagcttatattgataccctccttcaacaaggcttcaacttccaatgcttcattgaaggtggtcgctctagaactgggaaactgctttcgcctaagttcggaatcttgaatttcatcatggacagtatactatcaggtcgggttgaagatctcatcatctgtcccgtcagcactcaatacgacaaggtcattgagactgagtatgacaccccgctggtaccctaaacttttgatgagcattggcattaacccattctctaggtcatacattagcgagcttcttggtcaaccgaagccaaaggagaacttggctgatttcatttcttcgtcctcggttttgaccttgaagctaggccgagttgatgttcgtttccacgagccatggagtctccgagactttattggccagcaacttacgcgactagatcgccccagcaccgacatcaacaacaaacttagctatgctgatcgaggccgcattctaagaacattcggttatcgggttttgtccgatatcaacgacgtgtctgtgatgatgccaaccgcccttgtgggaactgtgctcttgaccttacgcggccgcggagtcggaaagggcgaattggtgcgccgactggactggctttgcgatcgggtgcgagctaaaggtggaagggtcgcacacttctatcgctcgccaacggagacggtagttgaccgtgcgctagaagtcctgggacccaaactcgttggtgtgatctcaggtttagtcgagccaacttactatgcggtagatcgtttccacctatccttttaccgaaacatgctcatccacctcttcatcactgaagcgctggtttctgtggctatgtacacaaagatcaagcaagggggtgggcctgccaatcaaataatcacctacgaggatttgaagaaacaggtgttattcctgtcgcaggttttccgcggtgaattcatttttccacctgagggcttgactcacaacctcgataaaacgttgcgtgggctagagaaggatgacgtgatcaagatcactcgtaatgaatccagcacaccactttatgttgaattgagcgagtctgagcgactatgcggtcgcgagaactatgacttctactgcttcttgatctggcctttcatcgaggcctcttggcttggctcggtgtctcttcttggattgacgccgcctctcgatagtccgaaggaagtttggatcgattcgaagaaagcacaagatagtgctcaagtcgtgagttatatttcccatgctacaccgactattgtattaatattcacattcacagcttggtaaaacgttataccaccaaggtgatctctcctacttcgaggcagtcaacaaggagaccctcaagaattcttatcaacgatttgaagaagagggtattatcttagttgcgaagaacagaggatcgcgtgtcggtccgtctcttaggctggctcctgaatgggcaccccagcgcgacgaagctactggaaaagttctagctggcggtcgactgtgggactttgttgaattgattgcacattcccgtcgcgaggggtgagttcattttattcagactatctctgccaatatacgactaacatttcacagcaaaaaccgtcgtgacggtgcaactgtttcttcccgcgttcttatcatgtctgatctcgttggacggaagctgttccaaaacgccgcggcatcggtgcctgccgatgtgtcgtcgcggcaaatgcgccggaatgcaattggagctgaggcaaagctctagtcattcccttttgatacccatgtacacacattgtacaggctgcttctacatctagctcttcctgcgtgtcataatctcaatgcacatattttagtaaaacatctccctgtctataactaagcattaattatcagctaatggatgccacctatagaatcaaataggtcatacatcgcttcaaaaaagaggagtaggcttgattcacctgtcagatttaagagtggggatatttggctacgaaggtcttcaatctctttttatagtggtccatataaaagtccagaatttagaggcataagtcgaagtgatagatcaacgattccaatatgacatacaatgtacaatatatatggagtgatgtaggtatgaagtcgtatctctaactcgctaacattgttgctgttcacatacaatcttcaataaataatcaaatataaaaacaacataagacgaatcaaatccaaatccgctgaactgttccccgtaagatcccaaaacagaaaagatgaaaacagaagaaaaaacaaaagaaaaaacaaaagaaaaaaaggctcgaccgctatagaaacaatatattgaagtcaccgaccaaatcaaaccgtcacaaactgacccttcacacccggactcgtgggagccgatcgaacagtcataaccttcggagaggaaacatcgattgacaacttctcaatagccttggtggccaggggcgacctaggaggtgtcgtgaccagagaatcggtagaccttttcgcaaactcctgaagccgacccataatgaccggggaatcagagtacagtacaataccctgcgagtaagtacatgcggtagctttctcttcatcgctagcgaagtcctcgtgagcagcctcgcgcgtaatacgcgggaaggtgcgcagtacgacatggcgagtgggctcgctcgacggggtgtgtttctgatctttgctggtagcgtactccagccagccctcgttcgagacactttctgcgtccggggcggggaaattggcaacgacgagctcgcgctcgacccgtgcgtgtctccatgtctcggcggcgagtttgacgatctttcggacgcccattaggagggagtcgaggtgcttgggatcggcaaagtgcttgatgtggtcgatgatttcgtcgacgatgactgctgctgctacgttgattgattgtttggcgtctgaggtggtgtaggctgctttcagggtctgctggcgccagaatgcctcacggcggacggacttgcgccggatgtccatagatagcatctggaagaaggtgtcggccttgtcatatcgccggcctaaggtgaagaggaagggttggaagactcggaaggttagggtttttgagatgatatgctggatgtaagcacatcgtagttcgcgggaggctggagtattgtcgaggaaaggtggaagttcggatggaattttggaaaggatgtccttggggggatcaatggggagatatccgaaatgctccttggatagattgtggatgagctgcgagagctctgtgaagcagtcaagactagaaagagagagtttattagatcatgtccatttatcgtaatcgttatcgtaatcgttatcgttatcaacatgaatcttttaagataatatatgcccgccgtgcgccgatgccaaacaaaggaaaggtagagaatgaatgacttgtctttgaagacaaagacgaaaaccgaaaacaaaagaagaacaaaaaaaaggacccgaaaaattaaaatccacagggcttcaaagactgacttacaagaattgatcgcccttcgtattcttgaggtcagtggcctctcccaggctggacagtgtctttctcagcctttcgcaatccgcgcccaagttatcgatggtcgttcgcatcccatccactgcacgctggaggtgctgctccttgacaataccgtctccttccaatttttctttctctcgctcggcactggaaagctcgctatctctctcagatatttgctgctccaaggcagcgcgctctgtggtccagagctgctctttctcattgaagtgagcttccaggtctgcgatcttatcatccaattctttggcagcagcagcgagttgttcgtcgtgggattgtcgcagggagtccaattcaccagcatggctttgtcgcagggagtctaattcatcagcatgggattttcgaagttcttccgattcttgtgcgttcttctggtgggtttcctccagctctgcgagcttggctgccagttcctcacgtgtcgatgagagttcggtaagtcgggcttgcagctcggtctccttggattccaaagcagcgatctgcgacgccacttctgtcttagtagcctccagctcggtgcgctgggtttcgaaggattcctgcaattgggctttttctttctcccattcggcttgactagcttcgtgttcactgcgaagctcgcactcacgactctctagagcctcagctgccgttttctcatcctccgccttgatctcctcaaacaattcagtgagctcctccttctgtgccacaagagctttctcctgttcctccttctgagtctccaacgctttttcgtgggcttcggttaactcctggatgctttcatttagctggttgatttgtccctcgagttcgaccctagtttcagaaagctcctcgttggacttctgctggacagctatgccatcttcaaggtccttctgcttctcctgcagatctcccagttggagacgcaactcactgatggtgtgcctcaacttggtatcttcttcagcactttcattggctgtcttcatcatttgagcttgcagagcttcgatatagtagtctttgtgcattagagcttgctcgtgcaggttttcaatatgcttcatctcagcctctcggctcgagagcttgctgtgggtgttacgatacccattaaggaggctgttgatatctggaagcgccgactggatgcgttgaagaagctcaatgtgatcaccgtcgttgtctgggggagatccattctcatggggttggccattgcccatggacaggttttgaagggcctgatatgatgctgcatatgatggatctgggatgctgtagctcctataatggccttccgattggtgctgaggagaataatgcccataaggaggcatcgttccggcagggctcatgacaggagattgaagagcatacgttccattccgggtggaaggcggttcatggggaggcattggcgcggctggtggattatgaggtggaggagttgcagttggtgatatagttggggacatttgagggtagtgggatcgtgcaagcgggctactgactttgggcaccggtgaggcaatgtgagctactgatgaggcgtaaggtgccggggaacctgcgtagggtccgggtaagctgtaaggtactggagagccagcgtaaggtgtggatgaggtgtaaggcacttgggaaccagcgtacggcactggagcgtaaagcgccggtgaggcgtagggtaccggagaagtataggcgtttggcgagacgtacggcaccggggaggctgcgtacggcactggcgaagcgtaggggtttggtgaggcgtatgggtttggcgacgcgtaggggtttggcgacacgtaaggtggtggcgcagagtaggggacaggtgaagcgtaaggggaatacgccgatggtccgggataataatgttggttatcctgggaaggacttgacatataccgtgcttcagtcaaggatggggaaggcaaaggcacacaggcggccacaggggagaatgggtccgccggtagtgatgagactacagtcgtctcttcagggcgctcagcttgattgggctcgtcttgcttgttatggtcgttcaagggctcctttgcttcaagatccgggataggctgaaccacacttgcttcttccacaggcggctcctcggattcagtgccctcgatgggaggctggaccgagcttgcttccacggccggctctttggtttcagtttcttcgatggggggctgagttgagcttggctcgtccaagggtggtacttcgttgacaggctcgtcgactacaggtgatgattgatccacgacagggtcagggatgtcttggggtgaagccttgtcgtctaacgcctcggatgccgatacgggggtttcgtgtacaggtgatactgaatccacgacagggtcggagacgacttggggtggagtgccgtcgtcaagtacctcgtatgctaatacggggttgtcgagtacaggtgattcttgatctgcgacagggttggagctgttttgaggtggattgtcgtcgtcgagcacttcgtatgctaatacggggttgtcgagtacagatgggacagggttggaactgtcttggggtgtactctcgtcgtcgagtacctcgtacgctgatacaggaagtggcgtcgttacttcaacgtctgtattgccagcagtagactcttctgttacttgctctggttcctgcgccttgagttcagggctgccaggagcaggagtagtggtagttgtctgagtctctgtgacctctgggctcttccccttcttaaccttcttgggggctgccttgccatttttgtctttggccttgttcttcttgcccgcggccattgcggtagagtgatgcgtgcccaagacttcttgcttctgacagacgtgttaccaataggatcaatgtgctaaatggagcatgagtgatagttccgatcatatgggatgaatgcactgtacatttgcaacaagccctgtggcgatagctcaagatatagcccaaaaatcgactatagttaagaggtattagaactttgggatacctaaaagcgtaagccaagtgacttcggtggatcgggcagagacctaaactctttggctatgaccgcgaatgaagacccacgaaagcgtagatattctcggggtgtaagaccaaaagaccgtagggaaggaaaaaaaggaaagaaaaagaccaacccgatcgaattttgcaaaaatctctcgaaatttgcatcccaacgttgtctgagcacaacagcggaccgacccttagcgtattgatacccatccaacctcccaatgtgcgagagggccatcaattagacgccagtgccgggaattattgggggcaaaaacaagatccgaatccactcgtattccattctgaactcaagcgagaccagttgggagatgccatggcattgggcatcaaactgtggatttgggcgatcgagataggtggggaattcgacaccgacaggctgacatgtccgatcgagacccgaagacatgggaattgaaatgaggcgatatagcaaaaggacgcgtctcgcccaagtgtggtcaactggcaatagtgaggctgccatcggacaacacatattactagatgaggcttcgaacatacggccatattggacatgcagattgtctactccgtactttgtatgccaagtagatcgggcttcagttttattttggtgttttgtatctgtacatagtactacacagagtgcattgcattgcatatagtactgatgtatctattgatcatgggagtcttgcaatgcgatactgaatgcatacgacgtatacggagtacactgagttggttcaccttccactcaacacctggacatgagagaatgaaaatatcagatcgattccagttgaaacatgagtccatataacaatttaatagccagcctaaatacacctaactataactaataagctaactaataaacgaagatcttagaccacatacatagttagggagcgaccctaaacccaatacggacatcacgtgtcatcgactttcactttccgcctcgccctatcatcactccccaaagggtcatcgattcataatcaattgcttccctccacacaatgttcgctgccagacgatctgctccttcgacgcggcagctgctgcgcactcagcgccgctggggctctcacgccgcccatgagcccgtgaacgaaggtctcggcgtaagctcttctcccccgcccaccgcgaccagacccgagtttggaagcagagcaagatatgcctcgatcgcccacgagtaattggctaacccttacgtgtacacctaacagcgcagcttctacgtcacatctggcaccatcgcttccgccttcgtcctctaccacatttccaagtccatcaaggaatccggcgaggcatcttggatgaccggcctcattaacaagtggacgccttcccaggaggtcttcgagcagcgcaatgctattcacaccgctatcatggataaggctgcttttgatcgccacttgcttggcagtcaaggcccagccgaggcttttgcccacagacagcccgagtatgtcatcgtgttgctccggaaatgcttttcattgttgtcttgctgactgttttttctttttccccaggatgttgaacgctggctctccgttcaacgtttcgcccggttcgcaggccgacctgagccatgtcgtggctcactaccagcgcaagaaccaggagatcgaggagtctcgggtcgcgcggacgaaggacggcaaggtcgtgtcgctctacgattaaatgggggtatcttttctctttagtcgactgtctaagtagacatgtgtggaggaaaaatcatgtacatatacgttgggacttgacgttcaatccagcacctgataattggattttcttttgtttttgacctaacgcccagatccttgctgaatattggttgaatgctggttttggatattcattttattaccgaattcgctaaggcccgcttgacggtacaacctccaaaactactctgcccacaccctcagattggacgtccaatttatgctgcacatccagctcattagcagagacagtacccagcacggcaaggaactcatcaacgccaccaccaactccgaaataaaccttcttcgccgcgacgagagcccgacttttcaccgatgcagtgttcgagcggcgcagcagcgccaaaagcgtctcggaaaacgcagccagcgatgcgggtgagtaaatggtctcactagcaagaactagagtcttgcgagcaccatcaccggacgagaagaccaaatccacaaacccgggcgaccaagcgcctgaaatgaaatcaaccgagatcccacgctgagtaagatcatctttgaattcttgaaccagctcaggcgtgatatccagctcctcgtcttgccctcgtgcagttaacacggctgagacagcggtttgagggcggctattgtgccacgtcaaaaggagattcgggagcgtgacaagacggagcacgtcagagttgtagtctgcaaaagtaaagagtgtctttatttgactctggccgggctgggcttggctgagaagacgggcgaacagtgtcaatgatggaactgctgtgcctgcgccgagctgttcattcatgttagctttcttctgccaggtggaatttgggagaaagcttccaaatggcggatgatttacgcacctcaataatatggatgtccgccgagctatcggaggattcgttaagaatgtcctcattgagggagagcttggctagatccaaggcacattcccaggttttgaagccgccttcatagaaattgggcgtgatatcgcctttttcaataccggcaataagctcttcattatcgtggcctgcgctgtcttcggccatgagctgggtgcgaatgtcaaagatctctcgacgagcgacgaccagaggcgtatcgctaattgagagcttattgtagaagatttgagaggggagaattgaaagctgccatcttgattagattttgactctggtggaaaggtatgatgcatttcaaagtaatgaattcatgctttcatgctctcgtcgatgatactcttcggcccgaattgggatttagaatgtactcgccaactcaaacaatataatacgcataattgagaatgaaatatcttgcttgatcacttacccattcattcatatcatgcctactcgctttcacgagctcaggaagagaattgcccacggcttgctgggaaggcatatccgagaaatcttgattgatctctgaatcgtcaatgtcgatatcatcccccgagaatccgaaactgaaggccatcttcacgtgaataagacggctgtctctccttccaagacacctagtattgtgtaggtgggttgtctgaagtggcccagatgttgaattcgtcgaaattgtaggttgtggacaaacttgcaccagttttggcaagaactgtatattcaaaggtaaggacgaaccgattaaatagtagtttagttccgaggctttcttttcacagatgctgtgatctgatttcaatactccgtacaaaaaattgcatggtggaatgatgactaagcggatatctggcacggggccttacctaggcaaagaattattatttatacaaaccttggagacaacggattcgaatgctattttgaaactgttagagtcgggctgtaataactataatatgattttgtaatgatctaactcataatgccatatccaagtgattagaaactgatgctgtctattccaatattaaatgcaagccgaagacgtgaactttaaattataggctgcgtttaagccttctgagccactgcagccaagctgagagcctgcaacacatcagcgtgcagatccactgcatcctcaataccacagctcatacgcacaaggtcatcgaagacaccggccgcctcgcgctgttccttgggaatgcctgcatgggtcatgctggaaggcacctcgcacagactctcaacaccacccagactctccgcaagggtgaagatcttagtgaacttgcagaaatcgtgtgcagcctgctggcctcccttgatacggaagctgagcataccaccgcccataccgtcacggtgctgcttgagggcaatagcgcggtgggggtgggagtcaatacccgggtagttgacggagatgacgtggggagaggattcaagggccttggcgatgacagtggcattctttgacgcctcgcgggcgcgcagatgcagggtctttagaccgcggtgagcgagccagcagtcgaatgcggacgggacggcgccaatcgcattctgcaggaagccgaggcgctctttaagggtctcggaattaaaagcagccacgcccataaggacatcctaggttcaagttagctgaattgatactggcaatgcgtaaattggaagtaagaactcacggagtggccattaatgtacttagttacggagtgaacaacaatatcggcaccgtggtccaatggattctggacgtaggggctcatgaaagtgttatcgacaacaacctgaatgccatgctggtgggcgatgttggcaacagcccggatatccaccaagccaagggtcgggttggagggggtctcgatccaaacgagcttggtctcggggcggatcaacttctccacatccgactcaatggagggggtgaaggtgacctggacaccgtgcgccgaagcaaccttggtgaagtatcggtgggtaccgccgtaaacatcagagaccgaaatgacatgcgagccagcagcaagagattggaggatattggccgtagcagcagagccggaggagaatgccagagcatacttagcatgctcaagagccgcgatggcttgctcgaaattatcactgtggggggtattagtccgcctgatcgatgtgtcaaaccgttggactaatagactgaccggttggggttggagctccgcgtgtactcgtacagaccaacggggtttccgacactggtctgagcatatgtggtcgacagagagatctagtcaaggtatcgttaatgccgtctttctttctcttctccctagattgatgagcttaccggagcaatgacagcgccggtcactgggtcatgaggcgagccggcgtggacagccagtgtcccaaagccacgctcagaagtgtgtccgttttcaatggagcccattgtgtatagagaagatgatttcaaggcaattgaaagaggcgaggggtaggttatatgtttatcgataagatgagatcacccgctttctttgtatgacttgtctgaaaccggaatgagacacggattgcgaatctgattgataatcaggagcgatggcgaataacagattcaatgactgcttttggatgttttcgtgctgaaaaattcaaccgagggagaaaaaaattcatcagaatccttttacatactaccaaccttggggggcagatgacgatggatcgcgcgatttcgactggacgagacaccgacggagctccaccggctgccggcaattctgctcggagaaccgtttggatacgccgatgagtcggacagtcggagagttcggcacttgccgcattgatctcctaattggtgtgtacgatactatagttatgcagtatattttatatgcatgtccgttattttcggaggtatatagttacacttgcccaggtgtattccatgtcaaatagctttacactgtcatctcggctcattacacatggtctatcaggtatctttatattcattggcattgattcgtatgggtatctatctgatctgactctaaaacaaattttatgggcgctgagaacgggtcgcgataggcgaacaataagacaatctaatgagacatcaaatagtggtttgctggcagcagcagcctaccaccaagtgatgggtcccgttccacccatttgcatcgagccctagaagatgattagtgagagctagaaaatcaacatggagagaccaacaagaatggagtacggagggcgcctctcctgtggggtttcatctgcaacatctggggcattggggatttggtcgtgccactcttctgattcgactcggaatcgtacaacttctcctacatcgaagaagaattccgttccaccttcactctcccagatccatacctgctcggcatagtcgctgcaagacacattagcatttgagatttgacatgaggtgagaaacagctcacaatcgggacttctccataagcatttgtggcgggatcagaatatcattgaagaattcgatgccaactggacttcgttagtttcgacgagcattgagtttttatactggaaacacactcttgattccatgttctgtgccgctagcgatctttccaagcatgatctcccctttgaagggtcggaaaacaatcatgcggaatttaactatgatagtcagtaaagagctcatacttgagaaaggggtgacatctaccgttgacattaaccaaccccgttccgtggccaatcaggccatcggaagactcaagtaggtcatagaagctgatgcagaggccaattttttgaatgacctagagcgcgggataaggttcgagaaactgaaaggaagaagcttgaattgcgtactttattggcatattttgcattgatgttgtcttcaagtgcaactgcactgaacttggagaaatcctcaggtgaaatctgaatcaagtccgatatggtggtctgccggcgttagaaaaaagtcttatatatgggcgtcaaacttactaggataaacatggtggcggcgaggaaggtgtagccagaagatcggtctgactaggcgaggacgaagtgaaaaggcttaaatatcttttcccgttttaccattgtcacgaagcaatcaacgatcaaaaacccttctgagattattgctccgcctataatcccgcccacacgtgaccccgggacggaagctttcaatttcaacctcgactccgctaataaactaaacttaagagattattcttgtgttggtgctggagtctccagcaaaccaaggctctcgtcatgagctcgcagggattctctttccctcccccgccgcctccgccgccagcgaccaaccaactgccggctcaccacccgacccaacatggacagagttggggtggacgcggtggacatggcggaggtcagaggggacgtggcagaggacagggaaaccgaggtcgaggaggaaatcatgcagaaagtggacgagcgccgtcatatcctcccccgacaggtttcaactacgcgcaaccaatgtacggcggatatccccaacctcttcctacagcaccttatatgcctccccaaccctaccatcatggacaaacgccggcctttcaacatcctcaaaatccacctccatttccatctcaacaatatccccagtcggtagctccggggaattatcaacactacaacacgcccaaccttcctacaccttaccctcccacaactccgacatacatgcaaggtttacaacctccgcatggccatcaaccaaacaaccaagcaatgatgcctcccatatcatggcgcaatgagatgcaaggtgcggtgccatacatgggggctcaaccggggcaagcacgagggccacgacctccccatgcgtatggcaatcagggtccgaaacccaagaataccccaaagcgggatcactcatctgcattcaacaaacctcaatcaactgcgcctcgaacccccgcagcgcctgccgtcccaagcttcggcaaccctctaccctcgaagccaccacccgctgcagactcgaccgccaacagaaaggcgaagaagagaaaaaggaagcacaatcaacttggactgacccctaataccgaggaccacgagtcaagcgaagaagaggttgacgaagacgaagaatcgaagctggcgcaaagtggatctggcgcagcaccacttcaggtctcatacaaagggaaaacggcaacattacaaacaccgtccgatattgccgcttggattgcagaacggaagaagaagtttcccacgcaagctcgggtggaagaaaagaaaaagtcaatggaggaggcaaaggcagcccgcgagttgactcgccaacaaaagcaaaaggagcaacaggacaagcgaaaagagcatacacaaaaacaaaatgaacacaagacagatcccgctgcagatgcaacgacaaacgcccagcgcagagagaagattcggcgcaaccttgaacgagaggagaaacgaatccaaaaggccatggccgagaccgaagctgctcgcctccgaatggaagctttacagaaggaggcattgagcctaaatgaagactttaaccaagacgaagatacgggtagcacgatcgagcaaccggccccggttatcaaagctgaacccgcaaccgcggtgccagagccagctatgaaaaccgaatccgaaaacgcggtaacggagccagccactaagactgaactagagaccgcggttccggaggcgaccatgaaaatcgagccccatggcccaattccagagcccgcgcaatcaaccgtggaaagcggggatgcgacagatgcgcaaggcgttcctgggcttttgttcgagtcccatcatctcgagcacacaatcaagaccgagcaccccaccgaccatgacttggatgccatggagctcgcatccgatcacggggccagtgattggacctcctcgggtgcttctggctcagatacagactctgaccctgacagcgatgactctgcgccagagcaagtaacttcacgtcgcacgggaccagagcgagtgccaccgccaccccgccaaggcaaaaagaccgtctgccgctattttgcacgtaatggccactgtaaccgtggcgaccagtgtaaattcctccatgagaatgactctgaacgaccctccaaggccagggcaaagcctacggagaagaaggagaaagagacgaaacgcaagggactttatcaagctgtgagagccttatttattgattttgctcgtattgaagctgtactgactgggattagttgctggaccgacagcagcaagacgatgaccgccgggcaatggaagtgatattctggctcggtcagaacaatatgctggatgccccacacgataccccaatgaattagcgttagaactggaactacgaaacattgaagcgcaaggatgaagtgaaaaaggtcatagctcggaggcgtagggggctttggtcggatttctaacttggatgaatacccgaaccctcagtcgcgtggctccgatagtacagagtcagcgacagggaattgaaagcgaaaaaacatgccaaaaacataccaaaaattacgttgaatcacatctgatccccattattctgcctagccaattatcgacgtatccaatgatgtgatctaaatttatccccccaagagagggttgtctcgtcgaagtgactgtagccgaccaaagtggatatcgtcatttaaggtcacgtcgagttcagaccagtcaacgccggagatgccctgccaagcgaggaaagatggccgtcagtggtccgaaaactcgtggatcaccgccacgctctcttttttatcggttttccctcttttgccctggatttgtctcctattagggcctcgcgggccctctttgggatggacggcggccaatcactcgccttgcttcctttgtatttgtttttcctcgtccctttgactctgccggctgtgcctagctccttatccatggggcacatgccctcttagttataaagctaagaccaaatatccccgacggtcttttcttctatatttgcctcttcacacgccttccactcctttgaggctcttgtgatttcactcgtttatccgcatctcccacttgaacattcgtttttcccaacctatatacatataccagtcataatgcgcttcttcatctctctcgctgtcgccgccatggccgccgtcgccgcggcgaacagcaaggctaaccccttcagcattcccgtcgagggttacaccttcaaggtcggcgagcctaccgctctgaagtgggagcctaccaccgacggcactgtcagtttgatcttgcagtggggagccgtgatcagcggtaactccggcactgtcattgcctgtaagcaacctggggatccatccgaatgactaatattccccgataaggcaccgagtctgactatcaccagcgaatatcgataacgacggcagctacacatgggatgtgccctccaagctggccgcccagccagactacaccattaagatcgtctcggacgatgatagcgacgactacaactacatcggccgtttcaccgtcgagggctccaccgtcgaggtcacctctacctcttccactgccagctcgaccaccgcgtccacttccactcagtcatccaccgagtcatctacctcgaccacccacaccactacctcggagaagtcgacctcgacttcttcggccaccaccagctcccccactactttgaccaccgcttccagcactgccaccagcactgctaccagcacctctgcctcctccaccgagtcctcggcgaagtccacctcggccagcgccagcgccagcggtagcgccagctcctcgggcgctgctagctccacgcccgcatcccagagcgccgtgcccaccaccaacgccggcatcgccaaccgtgtctccggtggcatgcttgccctcgttgccgctgctctgatgctgtagattgccatgcatgcagatattgtcaggaagaccttgttgcaaagtcacgttgacatgctttattgatgtatatttttttttttttttcttcacttctccgattggctgtttcctaaaacagccaatcaatttgtgttattgcctgtcccttttctgaggtgcagctgtacaaaacatcctcttctctgactacggtcgggattgtggctttgttattatttggtatactatttgtgtctccgtcagcggtaatgactgtatactccctacaatctactttataattgtgtattccctttatctgaatgatatattcgagtcatccgagtcatccgaatgaatctgtcagaaagacagtgggggaagtaattaatttggatagtcccgcgtccacttttttaattgtagtctaatctcgctggtagaaggaccttggatacagttgaatcacatataatagatctctagctgtggggagtatatatgtactccgcgaacattacctattcagattcaaacaggctatcctcccagtaaggggcctctctcaccgaagtacagagtagtactcctcacgaaggacataaataatgatcgtccatcggtggagacggtggccttgaaaaaaccaagcaaatttccctactaagtagggattttctcgtctccacagggttggagttgcggttctacatcattgttgtaccttgcaaagtctgataagcactttgggttattctccttctggtttttgactagctccgactagcaacaactcttctattttcctgtggcgatttgaaccttgttgtatcatcaagcctcgagtcgatctccgcggattgtgggcgagtgtatcgcaatacttgcaaggttcacgaagtacatgacatggacaccctatgtaccttcataggcacataaaactatatagtactcagaaatactcatcgcttacgacattgtcttgaccaagtccttggcttgtcccacttgaccatgtgcctgactcgtgaccacacaggcaccagcctccaggtaccaggctctctgcgatgaaatgtcaatctgctgagcgactcgacgtttcagttctccgtgaacgatgtcattgccagatggactaccacaccatgtgtttccaatatttccagggtctacttactccctaacagttcttgctatgctaggcaccagcgctatggaaaaagcaaccctggcataaaaaaccccattcaatgcatggctcttgacacaccgcataagcaatatgggagccccaagcaaatgaaccacgtcgctcattcttataatagcaccctggcatcgtcatcaaaagctcggctccaagcaagggtcttcacaaatctatcgcaggaacagtccactccacctcgtgtctgcagaggaagcaaggctcctaacactatgaagggcttttgctggaaatcttgaaacatccagtccatccggtcaatcaatagggcggattatggatctgggctctgatctatcaattgatccatgcccttcgccaaagaaaaatgtgattgcctatatgcaatggatgcagaagacatgcagaaaccggggtcctcgctatccaccttcttttgaaacatgaatggcccagcttgttcttttgtgtcacgttgctacaagatgacatcggttattggttggttgctgcgaacgatgacatgacagctgggtttgcaatgatcgaaccccctaacttgcagcagagcccattcagggctggaggatgatgaagatatttattttcgctagaatccgggctatgctgcataatttgcttattataaaggtgctgttgcatcctccctacaatatagggattggaaggtttttgcttgctcagtagtgccattcaaagatcaggtcagagcagagcagcatttgtcagatatatccaatgataagagggtccactatgctatctaaattctttcttgcatcggctgcgaccgtcgcggcgttcgctggcctagccaatgcccagacaaacatcaccgagaaagactgcgcctcctcatccgagtactcaaagtgcaacagggatgtcgcggacaagtggagctcctgtctccgaggctgtaacggcaatggtaactgtgtcgtggactgtggctgcgactctcaccagaagtatatcaactgcatggcggagtcgtgctggaaccaggtatgactttatatacaatttggtccaaaggaacacccggcaacgtctatcataaatccatgctaacaatatcttaatcctcaggtctactcttgcaaataccaactcttcgtgcagcagtacttcgccatctgccccagcgccaaagagccaatccccttctggccaccgccagacaacgcgccaaaccgctgctcatgcgatctaggcaaagtcactcaaacgacgctctcatcgcgcaaccagcaaatcaaatgcatgcgcaacgtcaccgacaacatcagcgcggacatcggcagtatcccagacctctcgaaactcaacaacggtctcgacattgccaaccgcgcctcagactgcgcctgctgcggagctagcgctagtatctccgcgtaagtgaagcacaccaaacccgcgactcttccaaagcacgaactaacccccgaaccccagatcctgggatatctgcccgcacaccgaacctactctcgccggcgcagacatgtggggagtatttttcccctccgatctacccaatctatacacctccctgccgaattgggcgtggtcgtcttgcgactcgacgctcaaggatacgacgtgcaaggacctgggtttcacagatacggataagttctacaagcccggcgatttcccaagtaatggcacctcgaccctgtacgaggttgggggtacggttacggcgcctcctagcggtactgttctcacttggtctcaggtgtcgactacttatactgttaccgcgactgggtatgacctcaaggctgtttctagccaaagtgagtaccgtgctacggctaccgggaccgatcaggcgtttgcgacgcagactgctgatagtggtgctggggctgtgaggaatggtggtgttggcgctgttgtggctggtgtttttgcggttgttatgttgtagcttggtggttaataaaaggtatgcatggactgtgctggtaggtggagggttggagaagttgatgtttttgtggtaattcatgatgtgatatgaccggtttatggaaatggtatgtggcgttcgcagcttatgtgttgcatggctactttgcaatagctgtcatgttggttatgccggtggatggggagggaggactggatactactcaaatacgaacatccaatgcacaagttcctttctcatatcgcagccctagtgttgctgatatcttcggaaatggtcgaattacggtggtgccgggtggtgatgaatggctaggatattttgcgaatgcgattaatctgaaatggaaaaaaacaatgcttctcaattgtagcctgcagagcagctatgaaatgatatgaaaatgccccgaaaccgcccagaacaacgccagttactccgtagatatcggtatcaaaagttggaactatctcccgctagaaaaagcacaggcaccgtagtcagtgtcccttaggacgaaaaagcaaaacaatctacgcatttggtgcaagagacgagaccatcacgcaacccacgatgggagaacccgcttcaggaacttcatgaacttccagaacccaaccgcgtactcctggttaccctgcgggtcgacaacccgctcggggaacgcaataccggcaccaaacagcccggggatgtcagatgaacgaccaggctcgtggaacgtgcctttatcatgatcaaagctcatgaaaaggggcgcaccattcttcgagagagccgggagtgaggtacgggtatacccgacggcctggacgagatagtcacacgcgggcaagtacttatggtactgagcagactcgatctcctgaccaccagcgcagtcgatcttggccagaacctggcctgcgtgcgaagtgggaagcttatcgtcttccagctcggagcgagcaaagtccgcagccaggcccttgagaccggtgttgtcgcgcagtatccagccgtccttgtactctgcgtagcggagggggtgacgggtgaaccaactaatacgcaggagagggtgggaggtttgggcgagcttggtgaggttcaggatggcgaggatggcgctgtgggatgcgccgacgatggcgacggaggtgggtctgtctgaggggagggcttttgctagctcggtgggcttgagcactaggtcgaggtccaagcgctggatgtccagtccctggactgggatgggggctgttgtggggaaggagcctgtgcagaggatcaggcgggtagtctcgatagtctcaagatcttccgatgaattctgtttgatgcaaatggtccagttggaggtctggattgtgatgttattattagccttcatgatagacaaggagatgtgcaataaccactaaccgtttcgttcaggttggctgatttgacaaagccgtggcatgcatatacttgctccatcttcaatagaccgtccgtcaggccacgaaccatatccgctgcaaaaccaagggggcaggtagcttcttggtcaagcttggccaatttggtgaacgcattaggtgatttggtattatcgataattttctggaaaggctgtgtggctgttgcgaacgtttggaataatgcaaccttggtgttactgaagggtaccttgttagtatcttccggtctgcgttcatgtcgagaagtgtacaaacctaggaacttcgcgatacttgctatggactcgcccggcctcgaaagaaggatcgacccatgtgattgagcccagctggcgctccaacaagtttcccatgacagcgactccagccggaccggctcctacgacgaccgctgcgcatttccgagtagccatgttgggtggtgatttagaagataggcgtaagagtgggaaagcgaataaaggactgaagcgattcaaaggtgtggaatgaaaaaagagttgtaaaaataacggtgatttgagctactaaataaacagaaccgtagtagctatcgcgacgggggtgcgcgacgtttaaaaagggggaacagtcggctaagacccagactccagaggacgcatcatcggcgacaggacgcgtggtattcacacagataacgcaacataacgcaaccagcgtccagtcaggacatcgctatagagcgggcacattcattattcccccaatatcccatgacacatgtgtagctctcggacgagatgggtcgccgttctatcgacatgtgttgaccaatccatcctgttccgcaggtggggatctttgacctaaaattggcttcacagttggcggttatctcccgagactttcagacggcgactcattcggcgactcgttcgggagggtttgagtcggcgactgggccccactgtgcgcttgccgtcggcctgtcggcagggtcgtgctcagttagtataggaagaggtgctcatgggataaacaccattttcagggcagatcagcggttggactgcatgacgactagcagcagggagaaataaaaaaaaagtcaagcagctaaggaggccgtcggctttatattgtgctgttttggcgtcgattaggcagccttggcaaaatggcgtgatcagttttgggcttcaaagccaatcatcggttagtcagtttgttgtatacaacttagttggttagttacgatgtatgttgtatgttgtactccatacggagtacaatcctagttgtcagctaagacgtggtaactgactagttatgatattcttctgaaagggcatttaatactccacaaaacgaaaacatgatatcagagaacatccatatatacatcccctcatacagcccagtaaatcctcacgctcgcttgatgaacgtggtttgaccagccgggaaaccttgcccgggcccaaagggcaatcgaatcgccaatctctaactcacgcacttcatgtccatcaagagtaagccggccacgacccagagtcttctcaatctcaagtgcctcgggcgagtctgcctggatatcatctcgatagtcccaaacaattatattgtgctgcatctcgctcacgtgggcaccattggattgcaatttgttgtggcgcggcaacagcagcgcatcttcctcggtatagtgttttcggacttgtccacgctcattgtcgaggatctcttgctcaattccattggcatacatgttcttcgtatgcgctccgtgaataacttcgatgtcaaaccaggtccatgaaaattcatacatgttgtcacggcatttcccactgccttggtcatgagatgagatattgaagactatcttgcggcaagggtgtgcaccgcgatgaggtaacggggtaggactcgagtcttgctccaagctctagaaagatatcaacacggccgtcagctaacttgggagcagataggcataccttccgatcgtagcagaggggaacagtcttcagcaaaacttgatcacaatctttttgaatgatccgatgttcttccagtttctgctctattgaaggccaatattccgcagcatcaatgatcatatcaatgagttcttcgggcagaccgcgtgggaccttccgttgcaacaaattccgaactttgagtacatccgctatgctgggattgaaaacttgaggtcctgggtccgagatacacgtatccaccccatcagaatctgtgccgttcgtgtctgcagagggttggccatgggaccggcggcagtttcctgggcgaactccgaaaggtaacatggtagtaatgagaaatctaggtgctgacttgaatagaaagacgtcgatacgtatgaaatttcttttcgctctgtattacctagcctcgggagctagcttcggctttgtttttgtcgactcgtatgtgcacctcaccccgcatgccacatggataaataaggctggaactaaagtacttcactttgggcggttcaagctattgatttcgttgaacgggattcaaagtaaagtgatgttcaacgtgagtaatatggatccgatggtggaaaggaaacagttgatggtcgacaacttgtacggagttacccgtgaacgttgattgttgacaatgacgtcagtgtccccagttataactagctgactttgcatagattaactatctccagggctggaattactacgtagatgctcaaattatgcatatctggtctcgaattttgtattcttcctacaatatattcaaatgcccttcctaacgcccatgagagatacaataaggcttcttttattttcagccccttctgccacccgcagctttgtatgcggcagcccgcttgctgcttctgctttctcgcttggccttcgatccacggcttttctgcttcattttgatggatgatgatccctcagtagcgcggtgaccctcgaacacgaaagagttgccggcaatggtactgttagcatcggccttcaccttggccgcacccgctcggcccaatagcctgttggcacgtccttgcatcgttttctgggcctcatctacacgagacttcttggtctcggggccggagggttcgcgcttcttagcgattttacgggctcgagtgacacgcagcttgcgggggagcataggcgggaagttctttccattgagcggaagcgattcctcaacaccattgccatcgtagaattggacataggcaaatcctttgccaacacgagtggtgctgtcacggatcacgcgcacgaactcaacgttcttcttgatggccttcttgtccttgcctccagtgtgggcgttgaaaattcgccagagaccctcctcaatatcggcgggagcgcgaaccttcttcttcttgccggtcttctcgtcctcttcgggagtctcactgtcaatgaaagacaggttgccgacaaagacacagcgcttgtggtcaatttctgaggggtgagcaaggctatcaactcgcaaatgacggtctaagaccatggtgccgttcaaggcggcgggagccttgcgtgcggcgtggagagtggtgtagacagcgtatgcgttggtgctgggtgtggtctcatcgaggatctcgcgcttcgcaaaggaagcacgcttgggaatgccaccgccactggcgaatgcaacagagcggaagcggatcgattcgatcttgtgcgggccggtggattcaggaagcgtcgaacagaaagaggccaggtgcctgagaagtgttttcttggcagtcttagatctgatagcctcggtggagacgttgcccaggaagacagtgcggttggacttctcaacttcatcggttttggcggaaccagtcaagctctcgtgcacaggtgcaggagcggcctcctcgtcgccggtgtcttctgataccgatgctttgtctgagtcctcgccttcctcgccttcctcgtcttcgctaccttcttgttcggtctgcttttgacgctttgcttgctcggacttcctcttttcctcatccttctcctcctcctttgcaatgcgacgcatatatgtctcctcgacatcctccccggcactgccacgcttgcgcttccggttctgtgtatcggtaggttgttcttcctcctctgcagcatcagaatcgctttcttcgccagcatcttccattaattcatcgcctgatgcagatgattcatcttcttcggcaacatcatcttcgtcattttttgcctgttgtgtgggcttgacgtacttgatcacgggtgcttgcacaggaccagcctatatatggtcagttcaaagtctgttaattgcgcctcaagacagacatacactctgcgcaaaaagcgaggacagtgttgggtccagagatgcaccaccgaagggaagagtggcagcggacgtgctggtcttctcctccgtcttggacgaagactttgactttttgcccattttgatgttcttggtctgtattatagtctaaaatcgagtggccaggaggtgggtttgttgcgattgacacttgcgccgatgatagctccgactttttttttccctttagtttctgcttatcgggtcttggcatggaaagataattatcacgtgaccaggaatacactcaagagtagatgttcctacagtatgcggtatatcagacgttgtatatgctagatatgcattaatattaaatatgcatgctttctgtattacttattcttcttgtctgcaagtacttcactctgtctatgtattccaggctgggaggttcttatttgggaccgggcggtaagctgtggatgtatgatgcacttataaaccatctaacctagtgagactgatgaacagattctttgttcttcattccttccttctggcataaaaatgcagtatcaacatattattctacaggatggcctgtctctttccaactacgtcagatactatatcacgtgacttgcttttttttcttcgggcggtgagctttaccctcgccggaacgcaacgcggcagaatcggcggtcactcgcttctgttgctgcaccccatctagcgatctgctgcttttgtctgttgaaaccccctctttccgctgtgattttccatccctgatcattggtttgatcttgatcaccgtccctagccacttcttcatgacgccaactcctctgcgactcggtaccctcgtcttgtccgcttcctagccatcctcccctcgtcctccagagtcggtctgcgtaggattcgtcggaccgaaagcttttaccggttacaatagtggtgatacgcgtggacctggaattccgtcataaatcgcgtctcaggaacgcggtggttttgggaatcgtgctcggtcgcgagcagctgtgctcattaccggcgtcgctcccggcgcattgttgaaacggtacgtcgcttgaggttctacatcaaccacagacctcatctggtcattttcgtggggagggagcgtctctatatcttctggaactactgtgatcggtacacttgctttgcgcggcctctagtccctgtgctgagcgactgttaccgaatctgggggcgttcgatgatcaatctccgcaccaccgccttctgggggcgctgacctatctcgcacccaccaaccactttttgcccaccaactccgtttttaactggttttgccgagttgatatggcaattgagctaattctatctgtggtttctccagattctcgctcgaaacaccatctggtggatcggtgaccttccttcctctcacgcccgcggctaatctcaacctcgctgcaagcaagcaaccaccttatactctccccttcaaaccttcttgtcttcattcacatcgtgttgcgccagctctcttagctgcataaatctccatggaggtagccgagagcagggaacaggcctccgttggtcccacaacgggggcagagtctacattccctaatggcgagcggaacccttttctggatgacccgctcatggacgatgatggacgctcaagtagcttgagtgagatcgacgatgtctcggacaacgagccgtccgacttcgaggatccaatcaaatcagacaagccaatggagaatgattcggaggccgaaaccgagcgcatcgaagattctccacacaatatccggaaacatgacattgtgttgagcgccgctagtgccggaccaagccctagcaagcttcatcaatctacaacactcgatgatgttgacgatgaagcacttgtggcagacgattctcctagcaaaccgcgacggtcttcaaaaaacaatggcttgaccgaggatatcccagacctaggcgacctaggtgattcggagctgccagataatctcaaaaaacgaaaacacgaaactgtcgccgaattaggcgacgaagagcccacgaagaaacgccggagctcaatcaagagtgacttgagtgacccgatagacgatgatacccccctatcgcctgagccgctcggtaatcccatggatatcaatgaaaatggcatactggttgacgaagttcctgagtcggatctcccagccccgccttccaaaggcaaaaagggcaaaaagggtaagcggaaaggaagaagggcccaagacggcgatgaggaagcagaagccggggtcgaggccacaatagagtatgttgctgatgagattcgtggagaagacgaggagcctacggaacgagtagatgagcccgatgacgcagaggcgattcttcgagccgaagagtgtaagtttatccctttatggaccttttgggtgcaacatatactgatgcctagttcagcggtgaaaaagatgtctgctatggattcccttgtgacactggagaaagaatttgcaacgttacgtgacaagtaaggaatttcccccatctctcacatgcttcgacgctaataatcataggatttatgacgaacggatatccaaactcaaccgcgagttggagatgcttaccggtccgaacccgacgcatcctgagtacttgcggcagatcgaatgtgtgcaacgttaccgagacgccaagatcaaatacgaacaaaacttgttccgacaccgcatgaagtcactcatgcacaagggtctggccgagcgaacacaggctcatagcacatactaccagcggattcgggatgcgcgcgagcggcattcaagtgcagtcagcaaacaattctatgccattcagcatgatcgcttcaagacagacgagctaagcccgcaccatatcatcccattccccacccgccgctcgcagcaaatcgcacatcagaccgcatacaaccaggaggtttcaattatggccggtgtggccaagtatgttggcttcccggctgccccgtccttgatgggtgcacggccgaccgaacttgatgacgatcttgaaaagatgggggtaagtcatattcacattcactatttggtcagttgctgagagcaggtcatagattcatatcgagtctcgcgcttcggcaccacggcactcatccgcaataccgtcacggaccaccatgtctaccatgtcttccaatgctttccgttcggccgcagaagaagcatttctagaacaaacaccctgggcaaacccacaacatcccatccatcagcaacaacagcaacagcactcgcagccacctcgactacaaggccgcacatttgagcatccgcaacaatcatcatatgcaacgccagccgctcaaaagcgggtagtagacatcaatgcgcctaatggatctgcatccaccattcccgagaacgcctctgctgccaactcatcagccaacaacaccccttacggcatggagcaagatccaagccgtcaaacgcaagggcccttccgcaacccagattatgacaccgatcatcgcaaatctgggttccggtcattaagttcatctcccttggatgtgcgtaaatcacagccgcatatcaaccatgtcctcgaacaccgttctcccataaccgacgcaccatcccacaatcacatattctctccgccttctgcacgccaaggcttgtttcaaccttcagccgctccccaacgggagacctcgccatccctcccgtctaaacctgttgatgtacattaccgcgcccatcaatccggaatatccacaggtcctggttcaaaccatatgcctaatcgataatcgattacctttggcgattcttattgaaatgacccgtcagcacccttcttaataccccgagagtctcctaccctcctctttcatgcatcttgtgcacttttcttctcctgtgataaatcctgtgtttttctactctccagctcttgctccagcagcaaatgtatcttgactgtcattttcacgcgtgttgcatgaatggaataccaatttggggtcttgtccttgagtttcaacagcgttaacatgtggggtactcctgttgttattacttctcactttggattcgaagactttatttgaatggaacggaatctggttaaagctgttattattttatcatccgatggggtgtataaggtctgaatttgtttttttatgcgtgcggtagagagatatcttttgcattggagtttctttttattttcttcgttcctctagtgtcatctgctctgtctaatgatgtacatacgacgttcttattttatatcataaacttccttgtagtctatgttgcgaccgaactgatctatatatagcggggctgaacgttggaaccatggcggcgccactatctatcctaagtggagctgatctgatgctaagattcacttcactgattcgcttgaccctcaaagctctcatggatgcattcaaggttagagccgagagagagtaaaaattattccatcatggtagactggttttcgcgtagctaaaagatctatcataaaaagtatacatccttctgggtcctatgggttttaaactctcaacgatgaagcaggcagttgataacgtagctaataagatgtgacaggagtgacttattttagtcaggttttcacatacaacatgcaggtagctactgttctgctaatttcggggtagcggtgggaagaaccgggcaggagcggttcccagttaggaaggtgcacctaatatttcaggcaaggagtggtctgatccgggtggtctgaccgaagggaagtggtgtgatctatggggcgggtggaggtatgaacaccctctctctctctctatatatttccagaagcctaggtttgcatattgttgagggattcccagaaattgaaaatcgacacctcatccatcaacgcatcaatggcatcttcgccgattgttattcctgctataggatcctcggtcggtacttcttgcggtggagaagattcggatgccaactgagggagcgctgtttgaggagtatagttggggaaaatgtaacggatggcttcgagaaaaatacctcggaagaccgaagagcaggggtgagtgtgttgcatctgttccaagactatcatgcagacctcaattttgttgagacccagacgtcgggaaacgggatccggagatttgcagttgaggaggtggacgtgcattgctgggaccaacagcggtgccctggagtgattgtcagataagatatcatttgcagaagagttgcacactcacgtcatagagcctgagaatcccaacagcttctcctgtgccagactatcaaggatggcattggtctgtagcgcagccatgttgatctgattgcggacgtgggtttgccatgtgtcttggcgagatacgggcaacccttctgggtcttttgttatgaaaggacggtaaaaggtgattatgaatgctcttttgaccgtcagaagcagttaaggatggatatggcgtcagcactcactggtaatggagctgcaagtgatacaaggaaaaggttgcaagtggactttgtcttgtctcctgatcttcgggaattcgaaagcgcaaaatcttttgctcaagggcttcaacctgttggaaagacgaactggccccaaagggttggtagcataaggtgagagtctcccctagaagctgagtgagttgaatcattgtcacccaatagtctgctagctgcggtaggtccttcgggatatatattgctgatatggattcgggtaagccgacaagatcacccaacatatcatccgcagatggcggtacagtgttacagtcattcatgttgatcctcaatggacgacccattgtgagacttagccaacggtctcgaaagaagcagatccaccaaagacggcgccaaagacgctgttgttgcccagtgataggggaattggcgcagaccgaggcagagaaacgatgcagacccattgtttggcaaaggctgatggcaataccaagccaaaaccacggttgggtgtaggtatcagcctcggagtggtaaaatcccatgagaagtgctgattgaaggagaactgtgttgtctgtttcacccccattatgatgcaggcactaagagcaggccattagcaagcataactcggaaatagaaagaatgctagcttgctagcttgcgcttacctttgcacgagcgtacatagattccttcatctctttcctagacgaaaagccctctgatttccaagtatcggccggaagatgctatatcccgcattagcttgactgcagttctactcggaggaggtaggctttacattcgctgcagcatagaaaatgctccatagtaatatcagattgtatggttgaccatctccactgggataaaggtgtggaagtgtcgtagcgtcgatcaccggcataatgggatgcacatgatgaaagtatgcccggagaagttgatcgcagatctcttttcggggcatattgaagcatcctttgtactgcaggtatgctttatcctcggaagatagcgaaacggatgttttggaagtgagcaggatatgccttggtgcaggttgctgtgaaggtgagcatgcatcgaagatagcgccaaacccaggcacatcaccttcagttccaggttagttttgggtgaaaacactcgcgcggtgactacatacctgtgtagaatggcgcttggccaggtttgtagttgtttttccggaggactttggttgcaatttcaacgccagtctgttcttcatcatgactccgagaataatccgggggattagagacactccttatcccaaccagctcagggcggtctttatgcgcaggcggtgcagttgggaatgcatcaagtgggagtgcagactgtgatatcaatccattagaacctgcgctaggtggactgttaatgacagacgcggttcgacgcgtgtgcctttcgcgtatgctatatctgtcagcgataagcttctaccaaatcgaaagaaaacctcacgtttgggtcttcgtcggcggaacactacattctctgccatcttgcgtacaacctatacacggaataccggtaactgtcacgctacagcggactttgcgctgacggcaattctgacaagcagcggccgatctatagcggcgtgtagacatggcgaagccaagtattgatctatcggtctgccgagaaggtcgggtcgccgaattgttgtcaattaaaaatgatccgaggtagccgagatccgtttcttcccgggagttccgaggtaagtttttcccaagaattatgaatgaccctgagagagggaaagggggctgtatttactacgaaaaagacggaagaacagagaagaaaggaagaggagatcgaatttgaaaggttagagatatatcttcagagacttgttagttatataggatgtctgaggaatcgtgacctaggcaaatttttcaaaataatctttaatgagggaaagaaaacctgttgcattcgctagctaagagagagagaagtccaggtggggaagtcaggtcctatctactctgtacctgaagcaaacaacggtctcaacaatcttcaaacaacatatattcaagttaaacgcaaaaagtatctatataccctctatataccctctataaacttctatagtacatcagatcagatttacacaagggcaattccagtaaaggcccggtcatcattggagtaaatcttctccttgttgttgccatccatatcggtccggtagatagatccgcccaggtcagtaagatagatctgagaattggcgggatctaagatcaaaccgattgcctcgttcagatttctggtgatgacatcatatcccagagcggagctagctggcagaaggagaccttgttcactcaactgagctttgttcagtgagttgccgatcgggagttcaccacgatcggtccagtaaagtgtgtgagtggcttcgtgcacctcgagatcaatcggctcggggagatcagccagaacaacctggacatcacttcgagcatctggtgactcgccctcaggggttgtgatattggcgcagaagatccggcctttgccagccttcgagggtcctttctgggtccaatagaatttaccataatttggcaccacagcaattccgacgcaccagtcggagatgcggtgctgtggattcgcttcaccgccggtgttatcaatcaaaacctcgagattggagccgtcgtaggcacaacggtagacgcggcagccttcacggtcacagaaatagacagttttcgcctcggaatggaggactatttgtttcggtgtattgatagttcctggggcaatgagtgttttgatgtcggttccatccacgttggcggagtaaacgcctccgtcgaacttccctggagcgcccatgcaagtccagaacatgcggccagagatcgggtctatgatgagcccatcaggcaaggattggtccttgagaaccacgttctttagcgtgccgtctgcggcaaagcgaacgatctctcctgatgtcacgccgggtttgatggctgacagtccaatgtccaacactaaaaggtcgggagtcttgggagtagaagtcgactcgctagcaggatagaggccacccttcgagcactttgttcccagtttgccctggtccaggtaattggccttcaaaaagtcgaccgtcttctcgggggagagcccacgttcctgcacataatgactctcaatgaaggcgacggtgtctaggccaacatctaggcaatttatgttagcgaacaacttcccacaaaactagggagacgagtgaaggacttactgtccattgtccggcagggaagactctttcccttgatgaacagttcattccacatcgaatcaatttcctcaggaaccgaaacaccctcagccaagatagtcatgacctcccgcttcacagcagcccacagccgattgaagatgaacccagtggactcctttcgcgcaacatatggacttgtggcggcttccttggagcgctcgaccatgaaagggaagatctctggggcagtgtgtccatcggtcatgagctccacgatcatacacgacggcggcatataataatgcatgttcagaacacgcttcttggtggcatccgagatctgactgattatctcagaagatttgtatgatgatgagttggaagccaggatgcagtcctccggggcgagggcttccaattcagcgaaagtggagatcttaagttcgagcttctcgggaacagcttcaatcacaagccaggcgttttcaacggctttcttcatgtcttcgaaggcttcaaaggatccggggatttgctttgttttggcggcgtaggattggacattttcctgaatgtatgcaattccgtctgctcgctgctgcgagctagggtctcgaattcgaacatcgtagccggctgaagcccagatacaacctaatagccgaagtttgtcaacacttctatccattgaataacacgtgggatgggatacagaccaattcggcggccgagtacgccggcacccagaatggtgactgggcggttgcggtagttgctcggaggtacccagtgtgatgccatgctgcgacgcaaagtgttcatcaagtgtaaagtgtaaaatgtaaaatgtcaagtgccaagtatacagggtaaagtgtaaagtgtaaagtagcctagttggtatcttcaatcccagtggcggatgggttccttatatgccctatcgttgccgccattgtcactttgtcatcttgtaccaccctcggaataccagtatccactatcccgaccgaaaggaagatcaaggggacatcggccccgccagcaggccgaggatcggtatcctaatttgatcctcggaaactcccgggccgtggaaatatgatgaacaaggaaattcttcatcaaaagaggatttgtgcaggtggatctacataatcccaaggcgtcattaaggcaatgcttagtgtgtgtggaccaagtcgatctctttcttgggatccactatcttatggaggacgatcccgaggtagtttacctcggaacccatatagaatcccctgggggctaatgccaattagaaatttttgataggatagaaaagaataaatggcgcgtatggttcctctaagactacaatataaagcatttgcctctagttcattgtcgcgctgaaagcacaaccgtcattgatattgcatccttccatacaaaatggcatctttgaaacaattcgaggcgagcgaagtagcagctcacaacacaaaaaacgatctttttgtcatcattcatggaaaaggtaatctttccctccttgagctaccttgttcaatcttctaacacacccagtgtacgacatcacagactatgtgcgagaccatcccggtggtgcggatttgttggtagatgtcgccggtacagatgcaacagttgcgtttgaggatgtcggtcactcagaggatgcatctgagatcctggacacatacttggtcggcaacatcaaggatgcgcacgaatttgtccaacccaaaaaggtcgttcgtgtaatcaagccaatctcttccgttgcggagacacctaagaagtcatcaatcaccctcaaaacagcgagcacaattactgccacatttgctgcaactgcactggtttacgtctgttcgaagaatcaccgaaccctggccgacttctgcactaagcactccccggcgtccctacggatctccgaggtgcgtgttccattcggaaacattctgcgtggtggattcttcagtggagtcactgctgccactctggcttgcgcgactattggcggtgttattggaaaccaactctcaaagttcaccaaagtcgactctggtttcaccaagtaccctccccacatgaaagcatcgacaatcaagaagcaagacccgcatcttgtgaagggtttcctagagcccaaagtctacaaaaaactcccgctcgtccaaaaagatcaactttcgcccaatgtgtaccgcttcgtatttcaattagccaatccacgggatgtgattggactcccaatcggccagcatgttgctatcaaagccatggtcaacggagctgctgtctcaagatcttatactccgacatccaataacctggattttggaaaactggagctagtcatcaaatgctacccagatggcattctcacaggccaataccttgagtccctagaagtcggcgacaaagtggaattccggggcccgaaaggcgggatgaaatatcacaatggtctctgcaagaaaattggtatgattgccggtggaaccggaatcaccccgatgtaccaacttatccgggcgatttgtgaagatgatcgtgatacgactgaaatcagtctgatctacgccaaccggactgaagaggatattcttcttcgtcgcgaattggaagcctttgcgcgaggatatcccaagaacttcaagctctggtacatgcttgaccatcccgatgagaattggaaatacggaaagggatacgttaccgcagaagtcatggctgctagattgcctggtccagcatctgatactaagatcatgctttgtggaccaccaggtatggtgaatgcttcaaagaagagtttggtggctgcgggcttcacagctcctagtgctgtcggaaagatgaccgatcagatcttctgcttctagccctggagagtgttttgattacataatctctctttttgtttcatgtttatagatgttgtatattagagttagaggaacttagagctgtttgtgaatttcatatgtttctattttgatatatttttgaaaatgcttcatcttaacttatgtatataagtcgattgcgtgtagattactacttgtagccttattcgattatcccagaggccatagctgccaagttcttctttcatcgatatatttgtttcatacaccatgtcccttgtcatacataggaaattcctttgtacagtttatgatttttacttatattgcggagtgtgacatgtctactccgtaatattatccattatcctttaaattataaggaaaatctctgaacaattacatgtagaaagcactcttgagaaaaagcatcaaagcaagacatcggagtgttaggacatgtaacatccatcccttccaagtatagccaggtgtcacatacgtggccacttgctcttgtatttcttcgttctagacttttcgagaggtctgtacttagagtggagtcggaagagagaataatatcatttcgggatcacatccccatatcgaaatgttccgtgggatcctgtgccttctgtagctggtttggattccgaaagctactgaatagggatatattctgcttagatccacagttgacagctacctagttacctatgttgtccatacgttccgaagatgagtaatgtctggtttacagacggagtgttgaaaatagataaactatattgagctaaatgtattttgcagatcaccgaggaaccaggccgttccgaggtacacgggagacatccgagatagaaaagagccaatcggaaaagcccatttagacccacaacccgaggaaataaattcccgatatatgaaacggccgggatctgtcgtgataaccattgtgcagttgatatataagtttagggtcctgaattgaactggctagacaaaaagcactcaatcacaatgtctgcaaagcaattctatctccttggagagccagtctcctccgccaagaacatcgatgtcgacccgaaaagtgatttgggtgaactcaaggatttgattgcagctcacttcgcaatcgttgagccaaatggtaagtttgaaggacttattctgatttcaggtggtaattactgacgcgtgataggcatcggtttcgaagctcaagactcccagctgagcgaagtctcggagatcacttcagccaccactcccgtcgccatcaccatcgatggacaagcggtccgtgatcctcctggcccgaagggcctcccctatgtcggaaatttcttcgaagtctacccagaccatcttggaaaccaccagcgtctcttcgaacaatacggaccggtcatcaagacagtcaatctgggccgcacgacttatcaaaccaatgaccccgctatctccgcgattgtttttgccgaatctgattttttcacaaagaagattaatgaggcccatccactctatcctctaaagcagcctagcgctggtgttttccttggagatacggatactcccgagtggagagtcgcccacaagtttttaccgccagctctcggcccgaaggccgttcgtcactatgcaccaacaatgcagaagacagtggaggatgccttcaatgttttcgataaatttgatgagcagggtgaagcctggaatgtgtatcagtatatgctgaagctcggagctcaagcagtgggcaagctcacgcttggcttggatttccaccactttgactctccggacgcgaatttgcatgagatggtgcatttgattgctgaacttctttctctcaataagaaagtcgcatccaagggagattggtatggtaaactgccattcggtgatccacagcggctccgaacgatcaaagacagaattgcaaagatggtggaggaatccattcagaaagctgcacgtggtggtgttgaagacctaccgcttcaagatgcagcgctgacagcgtctaacatggtcggtaagtggctatcatatatcaccaaatcccctgcttatatccatggatgctaataaacgcttcagactatgccatccgtgcaaccgacaataaaggtgagaagctgccccaggaaagcttgatttgggctctcgtcgtcgcaaccgcagccggcttcacgacgaccagttcacttctttcctggctcatttacggccttgtcacgtacccaggaatgcaagacaggctactccaagaactcgttgacaatggcatcgacgaaaacaccgagatcacagcagacgttacagaacgtctcgatttcctcgataagtacatcaaggagacccagcgtcgccacaacccgagtttccaaccgggacgaaccgctaaggtcgacctagtgcttccgggagggtacaagctcgccaaggactcggttattctcccggcgctgcaccacatccacaacaaccccgacctgtgggataatccttaccagttcaaccctgatcgctgggacaccgaggcggtcaagaacagacataaggctgcgtatattccattcgccaccggcccgcgtatgtgcattgggttcaactttgccttgcaggaagttaaggttttcctccccaagctcatcttccggtacaaattcactcgggagggcaatgaccccatcgagtatgaccccatgttccagttgattcgccccaataacctctatgttcgtgcggagaagagggtgaaatggcctcctaagacggagacattggcaacagcggatgtttgagagcatcctagcatagatagatgatagatgtttaagtaacaggcttaggcaacagcaattggtttgagaatagaatgtatatgagaatagagaatgtatatattatctcgtttataacgaagaacttcccgtctagcaaagcaaaggtttttcttgagatgtataaaagcgattttatccgaaattctatttgactggaaaatagtatactcgtggcagacggtctttgcaagatgaagcatagctaccaatgaccgcatgagattgaaggtcttgataaaatgcagtgaagctataaacggatattcattctctcaaaagacaaagtgagggagatggaggcaccgtagatgtcacatattcgaagattaaacccgtaagatggatacactagaaaagaggtataatgaaacggggactaaaaggcaccaaaccgaaggcatgtgcaatatagataaaaatgcccgaagaatcctacctggcattcaaattgcagaaaaatgaagaactcatctcatgtcatcatcttcttttcatcgaatggtacaaataacaagattatggatctgaagtagtaggctttgactcagatgattctggtgcgtcatttgctggcttcagcactgtgctttgcgggcgccacttggtgaggaccttgcccgcagcaggtcgggattcctcgtctgttcgtcgcatgttagatatatatattaccagtggatattagggagggggtatatttacaagtctggtagacatcctctactgtgttcaagcacatctctcgtgctggaggtcggaacataatcaggtacctaaaaggaagtcagcaagggagttcatgatagtggaaaaagtggaagacgacatacatcaatgattgaacgcaaaggttcacacgttccggatctttggccaagctggccacccgctgagtgataggaattgtgatctcagggacttcactgagaaagcggaccagcaccttgatatctcgagagtccaaataagctaggaaaccatccaaaagtcgggtggcccaggtatcgtagttaagagctacagtcggctccgagtcttcctcggtgtcatcccgttgattggcagcactcttcatttgaattcggtcattataccactcttcattgagccagataatggcaatgttaagtcgccctcggaaatcttccaagatgaaccgatagagcgtttcgcggatcgagtcggcaatagttgtttgcctacgtacggcgtctcccttggttggctggtcattttcgagaccggcaggtgcccgtgtagccagccgagcaagaagaacagaccatgcgtcccggtcaaatgtactccctgctaatctagcgaaaccgagcttttgttggcttagacccttggcaggcgcaggcgatgtttcggctgcgttcaacattccgaacacacgcgcaacagcactccgtccgatttctccagcctcttcttcgctcaatggaggtggttgtggcaggacaaagggacccaatgagaccaattctggttgtagatctgctacctccgccgcaacagcactggcctcttctgaaataacagatgctacgtccatgggctggtattcaggctcatagtcatcatcctcatcttgggctgctgctctctgttgtagctgccgttgcaagttttgatcctttgtgattgtctgatatcgagtacgaacagcctaggtcatgtcagcaaaggataaggcttcactcctatgaaggtacttacatcgacagcttgtgcaagtgttgaatcatgtacttgcgacaagagcggtacaacaatcttgaggactagatcaattggcagctgttttacgtcgaaggaggaaagtccggtgtcctcggtcaaggtgaagagtcggtcaaagcttgcaggccccggtgccattggaggaatcttgagcatcgggggaggcaaagcatggagacgcgccctcttagcgttgtcaagtccgtcggtaggttcatttggcaatccacgtttccgcgaagcgtcgtcagtggcctcaagtcgtgattgcattagacgttcaatgtacatttgcatccgacccgctaaggggtggttcgggttcctatgatagtcaggtcaaaccacatctttcgcagccaggatgacaacatactttttcaagatattgataagcagagctcgagctgtgcgctccatggacttgacgctgacgcgaattgttggagtaaacggcgcgtggacgtgtttcgcgggataaaactccaaaattgtgttaattatcttgtttgctacggactgacgtgtccggatgagaggggcgaggcagtttaatgtcgcattcacaagaagagcatcactggtttgtgttagcatcttgatcaactcgtaaaataaattgatcctcatacctagtctcttcttggaaaacgccaagtagtcgatcgagaagacctgaggattccgcttccaggttcggtattgacagaagagcatgattccggggaacaacggccaaagacgtctcgttctggtccggtcgctgattgaagttagtatcgacacatccaactctgtataacccgccaagcataccctggggtccgagatcaatccaggcgtctgaacctggaccacacgctggatgaacttggcacagcaaagcttaaccgggcatggaaacgagtccattctcctaagtatatcttgcttaatggcagtcattgtctcccatgacttgctatcctgtggatggttcactctgtgtattgttagctctgcacgaggtttacgtttgtaacgcgctcgtgcgtcgcagccacgaaagattgggaataacctacacatgtctgaagacaagaggatacaaactagctgaagtctgtaccaagctctgtaggactgtcgtgtctgtttccggcaactctagaatctcgcggatggtctgtaggacattcggtgccagctgctccttctgcgcaacagctaacattgggctagcaaaggtttctgccaggaagtttgcaccccatcttcgcaattccaaccgtgtactagctccgacgatgggaaggataccgttgacgatctgcgggtagaaggcggcatcgccgagaacgagactgcgggcggcattgagctgggcgacctggtcgatgacattgtccatgggctgagccattctagctctaatgaggaggtatccggtacgcaacggacgtgtcggattcgatttggtagactaggtgttgggggaagggaggacgttgatgggtggatggagaacacggatgcagttgcaaaagcaacgcgcataagcttgggtttgcgttctcagaactaggaaatagcggcaaaataactccgaagttggagagtgttagtggttatgcgatgggtgctgaaggaggggcgattgggaagtgaagttgatggtcgtcaaagatgcgacaaaagctgcgaggcctcaaaagggcggctaacaaagcctccgatgtatgtgagctccgtatctctacataaacttgatgcaccgagctcaaagtctctgtatgcttcaattgcttggaatttaatacagccagtgtctcaattacaatcaaaagtctcgatctaatctcaatacaaacatctaaattcgcatcacgttgtctgggcctccaacgccaagacttttcctccggatctgccttctatgccctcaactttcttgtctctcacgtctctcttaacaaacattcccaccatggctaccggaatgtatgtatagtgtctatagactcagagaggtctcatcttgctaacatcatgctctgtgccagcttcaactctacctactacggcaaggactaccgggccggtgccgccctcctgcgcgcccgccgcccatatctgtttaagaataccctcacaggctttggattgttcgcatttacaattgcagtctgtgagtaaaccctgtgtctgataccgatgtttttccgcttcagcgctgctttatctccgaaccgcagacgatcatgccaccaggacttggccgctgagaagcgggctcgatatctacaagagacaggacctcatgctaatacggcttctattttcagatacatacaccctcaaggctgtcggccaagaagactttgccgatgtcaaggtccccgatgcccccgccgacaagaaatgaagcacacccaacataccggtacttggggatcggttaacgctgccatcggggttttggagtcttcagggagaccttgtttttcagatctgtaggattagcgataatatcagcatttgtgctgccgtgcacagaaggaatttggaatataggctgtacaatgaatttcggctacggatgttatttctatgtgccctaccaactccaaaaagaaaccccgacttctcctcgctactccaactctgaatcgccaatgtcacgtagtgaaggtgacaggcagagttatttaatagccttctgagaagaaaggcattgatatataggttaggtaactagacctagagtatattggtatggttttgaagcatagctatgccagagcgaatcacaacagccaacaagacaagaaaactcaacgtgaatctagaaaacaaatctctactcggttcgcagaacacgagggcccttgtgcttggtggcacgcttgcgcttgaggcccttgtcgaaggcaactgcgttgctatgatcacggccgaggttatccaggtccttgaccttgtatagacgaacgatccagttctcgctggtgaatgcctcttccagtgtgttgagttgtgggctctccttgggaagttttgtgttacggacacggtccatggcttgaccggccgggaagagcgactggaagttgtgataagacatcttgtacctattgatggggttagcagtaacttggataattaagatgtgaggttcttacatcaggctgttcttcatggcgggagtggcttcttcgtcgacacggtactcgccacgagcggtgaagtagtcacgctctttcacctcgtctggccagataccctcggcaatacgaaccatccagaggaacttgttcaaatcgtcacctgagtagccgagtagtccaccgaacacgaccaagacgtagtcgacatcgtgctgtcggagaatagggtagctaacttcctcgcgcgagctcattgccttgccaacagtagcaatatgggtgttgttccaggtgttgttgtcgaccagggtggggcggtcagccataccaccgatttggtatccataatcccaccaggacatgatcttggcattgtccggggtgttctggcggagccaatagtaggcctcacggtagtcatcgatgatgaattggcttccatctggaagcttgctagccagaaccacagagggagaggaatatgcgttcgaagtaacccaggtgcagtgtgcaacgaacagaagcaagtaaagagtgaccgaggctaccacgacagacttggaaaaccaggaatagataccgacaacaggattccgggttgaccgaagtgacttatcatccgtagttgccttagccttggtttcagtgctaggggtcgatgcaaccaggaagttatcgaggatgcatgacaaggccagagcagccgcaacacacacaatgggggtcagggtgagcatcagacggaccataacaccagcgaagtaactagcaaggacggagtagatgaccacaaagacatgctcatccttgagtttctggaagcacatgaacactccggccgggaacagccagatgaggaagttcaggtcaaagaagaaggcaggccaggcggtgggctggtgctcggagacggaggcaataattgggatatgaatcttggcatatccggtatcccacagagagtagaagcgaccactccagggagcaattacccctgagattgatagcaggacaagaccaccaaatccaaggccaaacgtaagtaagaccatagaagtgaggagcttctggaactgcttgccgggcaggtagcctcggatgaactcagcaaacgcaaccaattgaatcaacccaaagacacctatcaaatagttagaatgagacaacgatatggcttagaatccaaaaaatcttaccaagtgcagacatgtggtcactgttgcgaataggcaggaaaccgacaaaggggatctgcatgcttcccaatgttcccagggcgtaccaggtggtgtagctgatgtagacacgggtgctgtatcgtcccatgcacagaagaacaaagacatgcagagggatcaggttagtaatgaagacgtatccaccccaagcagaaaccatatatccatagaacaatgcagtcaaggctccccacatgatcgagccgttcttcacagccttgatccagaggtagaatgtgaacaccaataggaaaatggcaatggcttcattatcgtagctgcctgccacagaccgtgagatgtaaccgggtgtaattcccatgaaagcagcggcgagaagacctgcggaaggagagtcggacatctcagaggtaaggagatacatcgccagggctgttagtccagagaatccgggggcgagcatgacacagatgtttcgaatgtcgacggggatggtgaggagacgaaggatgtggtagatcacgccgctggtcaccatcaggccagggtacaatgtgccaccagtgacacgcccaagagggtgccatgttcctatagcacgagcattcccatcagcccaatgtcatttatagtatcatgcggaggacgtgcaatcacggggaaggggccttacggtcatcaaaccaatcccagaagctataaaagccattttcgatcaagtattttgtcgcacggaagttgaaccacggatcgactagagtaagacggtatcaatatctcgtttgtttcgggggttatcgaggtggccaccgcattcagtgcagcaacatagggaaatcatacattcgtgaatgatactttcaaatcctaaaatatagttagcatactgatcataaaggaactcaattgggacatactaatgacactgaacaagcggctggacaccgcggcggcggcaatggtacagagaatgataacccgcaatagaccgcgcgtattgcggccggagctgcctttcaacacaacatcaagcgaagacggggccatgatggccttgaaaacggagcgaagtccagggtcagaaatcaaaatagaaacatgaaatcaaggaatgaattgggctgagatgccagtggtgagggccgtggagaaggatgggaagagcaagagctgcgcaaggtggtcacttctgaaggtcttggcaccagccaaaggcgccacctccgattgctccccgcaatactacgactcatcactaatatttgttagagctcttttgactagattttgactcaatatacttgccactattgggtacatcagtattcctacagccatctacacttcatctacacctcacatgcccacatggagctgcctttgctgaccacggagcatctctcaaagctagtggcctccaacgctccaccgtcccaactcttcgaggccctgtcgcgatatgagcttcaagcatgcctcatttctaccaggggtgacagtgctaacacaggcggtagtgactctacactattgagcctattctactcgagcttctttctcatccatcttcttaccgaccaagtgttagttgcttagcgagtactattggtagttacgacactgctaatgaagctcgggtcccaggtctgaagctcgtgccttaacgaaacgaattcctgaagcactgctgcaacaggatccttctctacagaactgcttgactttactgcgagcggtatggcagactcaacacggccaggtctaccaggtactccgaggactaccatggccagacgttttgcagccattggttcggagatatgagagtatgtttctcatcgaaatgagcttcttctttccgctggatcttaaattgaccaatgattctgcaattaggtttcttccaagacaagactttgatcgcagtgagcagatcctacgaagctatacgactagcgacagcagcaacccaccttggtcttgaccaaaatcttgccaaagaggaagatccaaacataatatcgaatttcacgaaatatggatggacatgggatccggaatcaaagctgctgtataccaaacctatcgttgtatcgctcgcggagcctcagtcttccaacgggatccataaggcaatggcaatgctgggaacgcgtgcagggtaaatcttgcttggacaacgaaggaatgtcagttatttggtagatccaaacctggactacaatggctacgtcctctgtcctacggtggggatgcgaggaccgagaggaacgctaaaaccaactttggatattggtctgatacatactgggacaaccggtaacgccggaatgtaacacgatcttttgctcttgcttgtggtccaactgtagtgtacaggcgcatggcagcccagggtatgtacaggacccagataaaacgtctaaaaatgagaaacaaaaaatcgttccatcttgcgctcgcaatgccacaactcggggcagatcaaacccaaacaatcgtacaataagatggaactgagttgagcaaaacatgtctaataccctgggggaggtgcgattcccgcaaagagatcattgcatagcattcctcctctatgccatccatcatatttaaaccttagccttcaagaaggcctccaggtcgaacttggggtcctcgaaattcgtgataactatggagttttggtcagtacttcgggttttgaagatattcggcggctccggatgtcgttgcatttgtctgaattgcatcatccgaggggaatcaaacgtacgtccgctggtctgtgtcttggtctcttgctggggctgggtcttcttcttgtattcggccttggcctgctcgatcaggcgctccttgcgagcatactcgtgctcgatctctgcgcgcttggtaaccgagttgagagaggactggtggtaaacaccgtaaacgagaccagcaacgagagccgagtaacggaggacctgtaggttgggagacgtggttaacggccgtcgggggagagggtaacccttagccggtactcacattgacaccttggctagccatttctgcgaggtttccggaagacgggaattaaatgagggaataatgtgtgtaagaagaaggaaccgtgcaacaggtgtcaaccgtcaatggcaataaatctccaggttggttaaatggcgaggttcagttcatgttctgcgcgcgcgagtttttccggaccgctccagagttcccgaagacggagattagtcatccccgtaaataaacgcgcagtggaggtactacacttggacgtggacgcatctggtctaaccctctataattgtacaagatgtcgatgcaacagcgcaaggatgaaattctcgcaaagcgggccaagcttgccgagctcaaaaagcagcgggagctgcgccagaaggaattcacctcccgaaccagcgtcggggatgcttcagaggtaaatgcggcatgtaaatgaactacggagcttgtccgggtctaacaaccttcctagattatctcaccgataccaagccgcgcagagaatagacacgatctcgatgacttgatctctcgcttggtcgaccgcccagcgtcggcctccctcagccacggcgtcgatggcctgtcgcggagaggaagtcggccaacctccgtgttgagcgcgagccaattaagcggggagaatacagatacatatgcagctccgtcgcgaccacaatcccagtccattgccgtccagacaacagatgagccttggatttcatctgcaacggaagccccgcagccccctgaacttgaacccgaatacaaatctacacccaaaccggaagttgtcacctatagcaaagctgtgcaaacagacggactagatctccagcccgagacccctgaagggtctgtcgcttcggatgatgaggagtcgcccgatactgcgcggtcgagcaagcgtctcagtcgacgagaccgggagcgggacgaggaaatccgacagaagcttcgcaaggaaattgaggaagagctccaagctaccagtcagaccgataataatgagaacacagctgcacagtcggcaaagctgcgatatccccttcgcaaactcgacgatgacgaactaaaggcagtcacatcatcgaacgatttcctagactttgtggagcgctcttcaaaggtcatcgagcgagctttggacgaagattacgatgtactggcagactatgagctgggtggaactgatgggcatctgcaagaagatgaggagactggcaagaaaaggagaggaatgcatgaagtgtgtcatttctgggacgaacgatggagcaagaaccgcattatcagtgacctaagcttctctccaaaggcaagtttctacttccaatacatgtgctttggctcatgctaaccttaacttcagttccctgaattgttgcttgcgtcatacaccaagaatacttctgctcctcacgaacccgatggccttgtccagatttggaatcagcacttacaaactcgtccggaatacgtgtttcactcgacatccgatatccttacggcaaaattttctccctaccatccaaaccttgttgttggaggctcctattcgggacaagtgcttgtatgggacactcgttcctcgcgcgccggtggaggctctccagtacaaaagacgccactatcgggcggcggacatgcccatcccgtttacagtatctcgattgttggcacacagaatgcacacaatatcatgaccgcctctacggacggtgtggtctgtggttggacgatggatatgctctcttacccacaagatcgtgtggaactgactacacctcccccatctaagaccgaggatctagctccaaccaccatgtcattcccccacactgatccaacgttctttatcgtcggtactgaagagggagtcatctacccatgccatcggtacgatcgggccggtgccaagtcgggcacagaccaccgtctagcctacaagggacatacggcaccaatcatgtctaccgcattccaccccggtcgtggacccgtagaccttggcgatcttatgctgagctccagtctggactggagtgtgaagctctggcgtgtgcggccacctgcgacgactgcctctgccacatccggcatggcccaatcgcaagtcgtctcgcccatactcgacattacccgtgacgatgttgtctacgatgcccgctggcacccaaccaaacctggtgtgttctctcttgtcgacggtgccggcaacgtcgaagtctgggacctcgcttcagataccgaagtgccagtcgcgcgtgaagttgttgacaatacccatggcaacatcatgtcccgaagcctcaacaaggttgcgtgggacgaacgtgaaggacgccgcctggcaactggtggcctcaatggtgtcgttacagtctttgaagttggcaagggtctgtgtggcctatcggaggaagtgccggcggacgaatggatgggtatgaagcggcttgtgggaaagctggaacagaaagataaggatcgagtggcttagagttaccactccaatggcttgtgtcttttccgatgattgtcgatgtagttttcttctgcgggccgaccttccccgtctacctttttccccgcgaggcccccttctttgccatatacccccttcccttcggtcacataatttgtgcatgtgtatgtatctcatcgccattgcaaacgtcatcatgttcctggatccttatcccctcttcatctccaactggacctttaccatgaagatcgtgaagactaataataataaaaaatatgtgaaaacaatctactggcagactcaagatcagacaccaccttgggggagacgttgctgccaagaatgtttccccgatgatactcagtacacagccaagtctgcagatttggtatcttaagctagtcaaaccttcgtcattgactatttctttactcttatacaaatatgatcacaacttattgtgcgtcttgaagatctcgaccgacaagatcgaaccaatagccttggaaggcaacgaataatacatgaaaaggctgtccatagttcccttctatccaggattcgtgaagacgtcagcgtatacatgtatgtgtctattcttgttcgatatcaaaagtttcaatccatccattggtggataatatcgatctgcaatgccgagatcggtgcgagattattcataattctaaaaaccttaaaacccccgaggcagaacccaaaagagaaagcaagccaatgtggaaccagaccagttcacgaccgtttgcctaaatcgggaggtaaccaagcttctggtaaacctaatctatcccatagctacctcatgtacatacgtatgggctacaatttccgcgtgaaccaaagcctgtcagcttcgatatttcacggacatgttcccgcaataggacatgtcatgatgtcacattatctggcttcgagggcccctttgagccatttgggagcgatctcgaggcgagatggaggatgagaaagggacgaatccacgggtagatttctggaagggctcttccaagatatgttccaaacccacagagtcggttcttgcgttccatggaagatctcaactctaaaataatagagtttcaacggccatgcgcctagtgttgatttgaaggaacaccactcttgctatgtgttctccattttaaacgtgttccaatggtcgactacggcccttgcctcatatgcatatatctccggtgggtgtatttcggggatttaagggttcgttgttgaagaattttcttatttaatataccatactgtccatttttcctcgcccggttatagaacatagaatttcctacagatgaagatttcaatttcccttccctcgttatcatgggtgccgactggaacccgggtggccaacaaccatataatggcaattccatagtgggagctactgccgccattgctgcggtgcaagttgtcttcgttgcagggaggttctatactcggtttatgcaacggatgaaaattggtatcgatgactatctgatcctacttgccctggtaagtcccgctcggagatagctatttgaatatagtcatactaatatctctgctatctaggctacaagtttggcagaatcagtgctctttattgtctgtaggtgcacggtctcagcacccatctcgaagaacaacgaaactcacatatcatgcagtggccaagatcggcgtagttgggtaccacttcgactacgtatatcggatgcctgataaagtggctctcacgagaaaggtacttaccccaatcctttgatctctgagaattgcactaacgacagcatctagtgtatccttgccttcgaagtcctcgattaccctctcaacatcaccatggccaaaatggccctattatgcttctatctacgcatttttacaacccgaaagttccagatcctcgtctacatagtgggctcacttgttctcgcggtgggagtcagcgttcttctggagaatttcctccaatgtcgaccattcgcgtacatgtggaatcgaagcatccccggcggatcgtgcatcgatccagtcgacgcttatcggattcttgcgccatttaatgtcctcactggtgtgttaatccttgttatgccaattccgactgtgtggaaattgcatacatctagaaaacagaaactggccttgacgggtgtttttctgttaggtggactgtgagtgattcaaactttgccatcatctgcgcttgaaataaatacatagtattgatgggacattagaggaaatgtggccagcatcttgagaatggtgatgtactttgccgaatcaggtctcgctaaggaggacccgacgtgtaagaaccaatcccggacttggatcgaaacgaggactgatctataacaaactagggttcgcggcgaaatttggtatcctaacggtcctcgagggaggtttgattatcatcgctgcttgcattatcagcatttggccccttttcactcaggtcatgccacggcgagtcatgccccggcgttttcacacaacattctctcgctccacctctcgcagaactcaacacctggcctggtatttgagaagaatacccacaaatagtgaaagccaggaaggcattgcgcgtcctaaagaggttagtttgcccaaaaaaaaatcttggagtagcttgccgtccttgctttcctcgccttcctcgttagcagatttggaggatcagagatggtcaatccttatggacgaggaggtgagtggctctcataaaacggttgcggggactcattaataaaaaaataatttctatctcttaagtgtataatgaatgagccaaaaatggaattttagaagccccccataagtgtaccttggcttgtcgtaaaccagaatttatctatatatcataacatttgaaaagctttgaaagcggtatctgtattcaatgaatacgggttttgccgagttttcgtatttgcatttggtcagtaagtgtatctgaagccagacttttggatttcattcgttagcaagatataatcggccggccattgatgaagcacactcactacaccctcaagaatctttaatcctcgcttttgctgtcgattgacaatgtaaaagtaaatcgtgaatgcgccgacgatggcaatgagaagaatgtgagacctggtaatgttgtcagccgaagtccaatgttcaataatttctgaaacttacccaattgacacccaaactgcggtctggtattgcggggcttcttgctggcggacaataaagctgcctgctacacccccgagtccgttacacgcagtgaccgccgccgcggtggccactcgtttccactggccgacgatattgttggcctggaaggcattgagggcagcccagttcgagatataagcaccggtcgccagaaaggtcccaatataacgcactgccacccgggtagatacgggaataccgaacatcaggaacccagctatgaggacaagggcattgaagatgatcagcggcccacgcacgcggtagaaatctccgaccagtgatgtgagaataaccggaattatggcataatagtagggctaataaagaagttagagaatgcggcgtttatattctggatcaacttaccggtgtggagagcagaatggatttatttgagctgaaacccataccggactgtaagatgatgggtagaaaatacgacaaggcagtcgatatgagattgagcaagaagaacatgatcgcaaagccgtagattttcggatccttgaaattagcaagaagcgtgccccaggaaaacggttccgggataacatcagctcgatcatcctgaattcggcgcgttgcgaggcgcgcttcctggtctgaaagaaagcaaaagctgtgctgggcgttctcggggaagtcgaccatccaccagtaggtgataatacccaggacacaagtaatgagaccctgaacaacatacatccagcgccaacccgccaacccggccacgccattcagatgattgagaccaaaattgacaatattgccagtcgcaagaatcacaacttccccggactgcaagaatgcaaaccgaagctgctgctcttgtcgcggataccaggcgctaaccaggtaggtcagacccgggtaaataccggacatggcgataccgagcagcacacgcaggataatcatctgctgccagttgcgcacgaaagcagtgcatagcgtcaacagcccaaaggtgaatgtgattgtcgaaaaccagattcggggaccgacaaagcgaactgccactgtgcacggcagctgaaagatcacactggcaattgtgaaaataaatatggagacagagaaccggttgccctggcccagatcaagatcatccagcatcgtcgtcaccgatgctgaggacaaaatgcccgagtctagcaaattgagactgcataagagcccgccgatgctacacaggcggagatcgactttccatcgtacccgcttctctaaagcggcccactcgaccccgcgctctgcgttgagcctgttttgaccatcttcaggaggagcctggtcgaatatcacgccgtcggactgtgcattggtctcttgaaccactggctccaaggtatgcaggtcttgggccgttggtgtcaaagtgaacgagaattggcccttctctgaatcgaccatcttgactgagtgtctgaaggatcaggccaatcctcgatttccgtaatcagatatgtcgcaagttaagttgctaatccaatatttcttttgttttttcctccgacattccaggataagaacgtgatagaaaccggccgagtagtgcgtctcttagcgcgcaagtcggacctagtcccgaggtcggattatcaatccagatatttcggagtatttttctcatgatgtggcagtttatagggtgcaggcaagccagtctatgatcaatcacccaggctagtacggagtagacgcgtacatactttgaattcccacagagagcatgtgaccgggcacattccaaattggccctccgtgagatggcccctctttcccacaatatatattgcacgctgcacgggtaaattccgaaaagtcgcatacatggaggctttaacccatgattgaaacccccagtttacgcttattttacctgtgattacaatctaccgatgaatcgtgtccgtcacgaatcaaacgaccgatgcttcggttgcagcagaaaatgcgtttcttaaggaagaaaacatccgacttcaccgactcctcgatgctacaatactatctcaaaggaaatacaggaggatgttactgaatccataatcaacctctggtccgaaacctgtttgatcaacagggcccagattagaaatgccccgaggtcataggcgacaacttaaaagccacaagggatcgcatatatacgtcaaggagatcaatcgaaagttcgagggagcagacgaagaggcaaagaagcaaatgggtaatatgagaaaggatatggaggcctgaaggaagaacaagtgtgtcccgaatgtctataaagatatcaaaagcgggtatggagagttcgagaaaagatatggaaggttggaagcagcgtatggagacctgggtgaatgatatggacgtctcgaagctcgggggtttggactggaatggaggctatggagaaggaatttgatttaatcgacagagatatttctggcagcgaagctcgtgcttaagggccagagcaagataatattgtgcggcactaggggaggttacattgtccattttgacaaaggcacgctaattgattttctatctattattactccgtactatcgcagtactgaaaggattccaaattggccggctgattctactccgaatgtgccccgggctgacagcttacatacaggatgtggaatggaatgtggaacttccgtggaagcgtgagtttcttcaatgagattatcatgttcaggatgcctatgttataggcgttcttctataagatccgaaagaaccaatgggaacaagaagatttaagttagagctgcagttagcgtaccgattaggctaaaataggaaaacccaaaccaactaaagacaacatgcatctgtaggtacacatcaaaataaaataataagccaggtacaacggaaattgagccatcaacccgattgaaccacgggacgctgtaagctttgcgggcccggtgattgctctgtttgttgccccacgttcggtcgaatggagcccggggagcttgcaaaatattgccttggacttcccccacactttcgatttcctctctctccgcatttcataactaaactacacacccattatggtcgaactcatcaacccgcccgagactcgcgaactactccctcccctcctcgcatgcctccccctggcctttgtctcaccccgcgcacccccagctctgttaccacttctctcccctatcctgcgccaacgagtcggggttctcagttcgctatccacatcttccaccgagtcatggctgcaacttctgtgctgggaggctgggaaagcagagcgtctgcagagggtcattgacggtgccaccttcgaaccacaccccgtatcgggcgaaattgagcttccggatgaacttccggtcacatacaaacggatcgacgatgagactctcaaagcacaagttccgctcgccgaatacagcttgacggtggtctatttgtggtgcccgacagacgaggagggaggtggtcgtggctggcgagtcgcagagcttttgccgcgggagggagctgccgaggatgacgataaatgggcttcttctatctgggaagcaaacgttcaggcaaaggaccagctcctggctgatatattaaaggctgccgaggaagagaaatccccggagaacagcatggagaacgacgacgacgacgacgatgactactgggctcagtacgactccacacccggagccaagacacccgcaccgcctgctgcttcatcaaagccgggtccatctcacttatctgagcagtcatatttctcgcagtatggcgacgtgcagccggccatggataatcatgatcccacggaggagcaacccgaggttggtccatcatcgctcaacggagatatgctggccaatctcttgcgacgacaggtgaacggagtcaattcagatgacgaaccccgcaagaacggatatgccccagaccatatccccagtgataaggctgcgcaagatttgaaccacccacggccggcctctgcatcttccggtagctctgatgctatcgctaagctggaacacgaggcagagagccggtccacctgcgaggtcggagtgaaacaacatatcggtacgagcatcaagagtttgttccgtttggcaaaggtcactggaatgtcccggggggagttccaggcattggtttcgatggaattggagcttttggatattacggatgacgattaaggctaaaatacttgagtgatacccatgaatcataattttgcatatgttggccataaacatcattgggagtgaatggtttgctttgggcatctgatattgttttaaatacataaaccacaatgaacaactccacactaccttaaatcctgcacaggtgacgccatctcgcattgcatgcccgattaggcgtagcgcatcccaaaaaccaaccttcgagagaccatggatgctgcctaaatcgatgtacatcgtatcgttctaaccaattcaagcaattggaataaaccttggaaatgtcttaggctgagctcaccccgccctcaaacttaaataagagttggcccccataagacgtttacgagaagaaccagcttatttctctttcactcatacacaatgcacgatcaaaagaaccaaaatccatccgaggacagaggacgctatcatgaggaagaggcagcagatcagcctccagcatacatagcaggacccgcaatacaaccaagccgatcaccagcacaagcccctcatcaaacaagccacaaaccaatcgcaatcccagccatcacctcgtcctctgattctcctttcatccgtgcatatgcacccattctaagaaaccaccaacttcccaaggaatcgtttctcagcttcctcgaccaactgaacaaagacatagctgccagtccgcccctccaagtcctagatgcaacgggcgggatcttgaagtcggtcccgatattattcccgttgcactggattggcggtgtggtcagcggactcgcaaacatgggcagccaaggcatgtccaaaagccgaacggactcctccatcaaacaagcgaatagggacatattccgtccgcgcggcttggaggttgaaattgcgaaactggatgccctggcacatgttgcaaagctccctatattggattctcaaggcaaaatcgatcgacaggcgcctctgtttctacaactccaggatggggtgtccatggcgaaccctgggaccgatgaaaggcagcaacaggaacttgatttgcagcagaggatatcgactttgcagccctggattgctgagcttgaatttgatatcttaccttggtcttccaagtctagattgacccggttcaacgcctcgttgaagaagtataatgagccggaatatcaggagaagagaggcatgggtaggcgaggcgatgtttacatccaagagacaccacaggaagaggctccttttaggaaggctttgtggcttgttattcgggaggttgagacggatgaaagacgttaatatgtgaatatatatatatgtgcagttcaccgtctatattagacttggctgaacttgacaaggggcaaacaggaagattctttgtcaactagcaatagtaattttaacgagaataccagaactttaatgcatatatatctgtccaattagatgccagaccaaccaacgaaaaggtggtcaaaggaaatatcacatgtagccattgcgtcgtcatgaaaagactgatagcacaccacacttgtaactcccaagggtcaatttcttgtatgtaacctgtactcgactctcaaacaaggagttggtgctcaaagtacactttttgtggatttgtatacgtagatcccgcctggggccaccgccctgccccgaaactaaccttggaagaagacacgcaacgttctactgtcatccccctctacatctcctttcctttctcatagtttacttggcctcaattgttgggtgccatgcttatttggtgattctagtaagcttccttttcctctctattacaatttttttctgctttgttgatgtttactgacaactaccgaagtctatttggctataggtagtttctcggtcgctctctacatttcatattttcaacatgtcgtccccttcgccctctctgcggaagagaggcggaaaaaaggatgtttacaccgcattgccctctgaggatggcccggcccccgtgtcggtgccggtcaaacagaagtcggaatgggactattggctggccatagtgattcttaccctcctggcttttgcgacacggttctaccgcctcgatttccctaacgaggttgtctttgatgaggttcacttcggcaaggtatgaagtcgaataccttttgtagcggcacaatttatgaaaaagggggccctttgactgacattgaaattactcggccagttcgcttcttattaccttcaacgtacctatttcttcgatgtgcacccgccttttggaaagctgttgtttgcccttatgggttggcttgtgggctttgatggaagattcctgttcgagaacatcggcgactcttacatcgacaataatgtgccctacctctccctccgtgccatgccggctactctcggcgccttgacaattccggtggtgttcctcatcatgtgggagtctggatactctctgccagcctgtgtgctggctgccggtctgatggtgtttgacaacgctcacgttggagaggaccgcctgatccttttggactcgaccctcgtgctgtcgatggcgctcagtattttgtgctacgtccgtttctacaaattgcgtcaccaaccttttagccggaagtggtggaaatggcttctcctgaccggcttctgcatgagctgtgtcatctctaccaaatacgttggtttcttcactttcgtgaccatcggcgccgcagttctcgttgacttgtggaacctcttggatatcaaccgcgagcagggagcactgagcatgatcagctggggcaagcatttcatggctcgcgctgttggattggtcattattcctttcatgttctacttgttttggttccaggttcacttcgctattctcaaccggtccggccccggcgacgacttcatgacacccgagttccaggagactcttagtgacaatcagatgaccgctcagtccgtcggaatccaatacttcgacaccattactatgcgccacaaggacactaaggtcttcctccacagtcactgggacaagtaccccctgcgttacgacgatggccgtatctctagccagggccagcaggtcaccggttatccccacaacgacaccaacaaccagtggcagattctgccggccgatcctctcattgatccatccgagtccaagagcgtgcgcaacggcgacatcatccagctccgccacgttggaaccgagagttatctcttgactcacgatgttgcgtctccattattccccaccaaccaggagttcactacagtctctcaggaactggctgagggcgagcgccacaacgataccctgttcgagctcaagatcgagtcaggcaaggctgcccaggagttccgtactcttgccagcctgttcaagttggtccacgttccaactcgggttgctttgtggacacacacaacccccctgccagaatggggttacaagcaggccgaaattaacggtaacaagaatatcctccaatccagcaacgcgtggtacgttgagaacattgaaaacttggaagaggatagtcctcgtcttgttaaggaggagcgtaaggtcaagacactgcctttcctacgcaagtacttcgagctgcagggtgccatgttccaccacaacaacgctctgaccagcagccacccctatgccaccgagcccttccagtggccgttcctgttgcgaggcgtgagcttctggactaagaacgatacccgtgagcagatttacttcttgggtaaccccattggatggtggattgctagcagtattctggccgtgtttgccggcattgttggtgctgaccagctctcgcttcgccgtggtgttgatgcattggaagaaagtgagtcgaaaaaccaaacatcctgctcttatccctttttttggttctggcaattaacacacgttcattagtttggggtcccggtacgcgctcgcgtctgtacaacagcaccgggtttttgttcctgtgctgggctgcgcactacttccccttctggctgatgggtcgccaacgcttcctacatcactacctgccctcccacctggcctccacaatggtttgtggcgcactggttgaattcattttcaacctgcagccgctcgatccccgaactgcacttcctcctgtcgatgatccctcgggcaagtccaaggcacggtcggtcagcagcctgcgtcggttcatcacggccaaggaacgcatgggctgcaagtcgctcatcgcgggctggattgccactctcatcattctggctgccaccatctggggcttcatcttctatgcgcccttgacctacggtacccccggcctcgatgtggccggtgtcaatgcgcgcaagtggctcaactacgacctgcactttgccaaataagctcgtcgctgggccaaggaggcccaatccgcgagacaatacccattcgagacgatgggccgaactgaaatttcaaattcacaatttttgtaagataacttataatccgtgataaaaggcgggtagagagaatgtgtttttttttttttttttgcgcgatgggaggattgatatcagtcgttggtatcatttgaaaccatggtgtatgtgcatgtatgtgtggccatttgagtcctctttttctccatcttgatgtagtacatattcaatgtcccatgttcagaatttctcagtcgagtcctgtgtcacaattggtggcacgggattatcagccgaccgtgcaaactagtctgcgatcgttgatccagccttgttatattagggttcgagatatagataggtacggagtacgcggagtagataggagtcgatgcaagaagaatgtgccaatgtcgatcgagatcgacttcacgtgatcgacgatcggtgacatgtgcgcatcgcattggagcagatgagatttcatcgttggatactccgtccttgacgagctggcctgacgacgttgttctttttattcaaaaggttatatgaatgtcttatgtatcttgcagatgcctaggcctaacccttttctcttcccacattccaattcatttgcctttttataaattggggttatttttagaccgcgaaaaaaaaacagcccactgtttatgtacaaagggacctcctactcgctatgtatagcaaacggtttcacattgtcctatgagatcatgacagtagccgagttttaggatcctaaataataacccacgatagtaatatagtaatctagtaatacgccataataccaacggagtcgaatgtcaataatagtcctaatacggaatcctcctcagcccatatctggacactacggataccaaagggactaggctgtcagtagcgtcttgtcttttttgcctcgctttctacgcattctctctctcttttctttcttttctttttcattctttactccctagtggtttcttagggtctctccactccccgcgtctccagatctcattggtgttttctttgagcgagctgaaacggacatttcttcgtctcacccgatacttatggtgggttcggattctttccagaaaaaaaaaagagcacatattcaaggcccgcaaggaatttgggagtaattattcaattcgttgtgagatgctatcggatcggacagacacaagacaacccactctgtggattcctgccgggcctttgatcggccgctagaacaaacccatgttgtgcttcgtctctccctgaaagcttctgactgacttcaattcttctccagcttatcccctaagctcagcttgcctttgttttccctcggtcaatcgttatacctatctatcggactgatcgcttcttcgggtatcacttggattcgacacatcaccctcaaagggcgacacacccccccaggatagtccaaagcttgatgagatagctgactcggaaaggcgcactggccggttcttcaattatcagcccgatctttcagaacagttgcttccatccctatgaaactgcccaagagctttaccaggcggaaatcgtccggcaacgttctagaggaggtggaatctcctcaccaatcctcctttcgagtctttgagcgcccggggcctcatcgatccatgacggatggagcagccctgaccaagccgctgagtgagggcaacacggtgccgatgacggaggattctgataacatctttgcggagagggagcgacccctggacaagagccggtacgatcgtccctcgaccatggattctctcaggagacggctgactgggaaccgtgatagtggtaattacgaaagctctacgtcaactaggctaagctcgtcatccaccctcccatcgtccaccgaggtcccgccgcccgaggagaccttatccccgcattccagaatccatgatgttccagctcccccacccctcacgagtgcgctgcgtgccgcaggacggaccttctcgttcggtggtcgattcagcaggtcaggaccacaagtgcctcggcaacaaacaccagatgccgcgaagaatcgcccggtgacgggcagcaccgacagcacggccactccacccaagctgcccgatacagacttcgctctcggctcgcaggatgacttcaacaagatgtttgataacctgggtgctcgagagggttcggcaatacgggggtcatcccctaatccgggcaaggtaagagctgcaatcgctcgtccaggaaaggatgcagtgctgacagaatcgcagtattcctcgtctcccccgagtcatgttctgtccgggtttcaaaacagcagagctgccgcacccgctgcgattaatacagaccgatcgactactattgagtcacccccttactcctgggatcgtcgcccatccgaggagggcctgctacgtggcccgcgttctccgccgctgaatcagagccagtctaccctcgatacagttgttggtttccggaagttttcgccgtctcccaatcagtttgccgaggctactacttcacatcgttccttagagcgcccccagggatcggaaaggagaggactgcggaggagtgggatatattcggccaaggaagaatccggatctttcgacgacgaagatgccaaaatggttcgacagtctgtcttgttcagcaaagaaagcacgccaccttgggctgagggtagcccctccggtggaaccccattgatcgataagggcaaagcacctaattactctggccaagtgaacccagaacccgataatatgttccaataccgccgttcgcccgctccggccgagagattggacccctccattgcggatcatgcacggttggctgtgcagtatgcggatagtctccccaagtcatcctcgccgggtaacaaggtgatgactccatctcagttcgagcactatcgccagcaacaggaacttcgacgttctaatagcaatgcgactaagagcgatgatgagtccgaccatgacgactttgacgacgaacaagatgaggtggagaagcaacgggagacggaacgccaacgacgaaggcaggaggctcatctctctgtgtatcgtcagcagatgatgaagatcaccggccagcaagcacccgtgcaatcgctacgcccggtgatgagtggagctagcaacagcacgcccaacttgctccccagtcgcctgtctgcactaggcgagaagtccaccagtgggaagagcagcgaggaagaggatgacgatgtgccgcttggtattctggccgcacacggtttccctggtcaaaaccgcccgccaacccgcctgaacaacgtcagctccaaccccaaccttcgtgcatccatgcaaccgccatatatatcatcttccaactctgtttcaggtgccgatccgaacggcagccgaggcagtctgccaccttttgcaaggaacttgccacgagatccttacttcggtgcaggtttggttaacaacgccaaccgtgaatcgttggcgttcggaggtggttcggtatatgggggatcgtcgtcccccgcacctccccctggaggtcttgtcggtgttatagcaaatgaggagcgggcacgggccttgcgcagaggaagcccgaatacacaagcaatgcatgaaatgggaggggtgcctcggccatactcgacaatgccgccgccgcagcagcaaaacgttaccgccggggaacaagcttctatccagctgtcgcagcagatggccaacatgatgcagatgcaaatgcagtggatgcagcaagtgatgcaaatgcaaggtgggcaaggtcaacctatgatgcaaggcatgcctcctatgatgatgcctggtggagcaatgtccatgcctcccatgggccctccttctatatcgggaccccagtccatggctggcaatccgaacttccggccgatgtccatgcccgcaacatcctttctcaatatgccgccctcgcttccaccccaagtcgatcagcgcacgatgagcatgctggaccctaacgtttcagcccgtaggaccggctcgcctatgccgaatctgtccggcaattccttccggcccaacaccggatatgcggcttcaatcgctccgtcggagcgcagtaccgcgggcatggcgcctcgttaccggccagtatcagtcatgcagcccgaatctaattacgcggtggcatccccaacaaacaaacctttcggtgacgaaaatcacaatccgtccatgccgatgcctcagtctcacattccgaaatcgcatctcgcaactgtaaccgtccgccctgtttcacgggaaaatcaaaagcccggttctgaggacgaagatgacgatgacgaggcctgggctgacatggcgaagaaacgtgaaaaaaagaagagcagctggaagatgaagcgagggacatcctcgttcggggatctgctgagcgccgtgcactgagtccctgattccgtttcctctctttctttctttattcctcaactcgaccacgaaagcgtgcttgcattgcatttgaaaagaactccgtctgtgctacgctgtataaactgtccctttattctctgcatctccatgcccgcttccgtttcctaatatcctccgcttcctctacaacatgacatatgacgcacataccatcaactcagagaagggcttgccgtgccatttggatatgccggctcgataatgcatccccagccctcacctcacatcttgtttgtcactcctcgctcccgggcccgggtttccttgtatcatcttgtcatggtcattccggtctgggcagagagatttggcatttacaagtatgaatacatatgctttccttgtgcttttactctagtttcgatttttgagctcggtcttctgcgttcctttctcgctttctcatgatatcggcacgggaagagacatggcgttatttatctgataggtttctatctttgtgctttctcatcttgtattctgtctgttttgcattgtctattcgccagagcgacttccttaatatatttcaggtcttgtggccattatctcggctctttccaaggttcctttttccttctttctttcttctgtttaggttttgtgttttctacctcaatggagatgtatatctaacgatagcgtagatctgggtcgagataaggaagggatctccatacactaggtagttacggctaatatatgttatgttatctcatatcaagatgatcgattgcgtgcgtatagcttagaagttacgtcgtgtgaatggtgtccaagcatgaatttggcttggtttagtaggctacatgtctcggaatcccgaggcttattaaaattcattggaaaaatcgtggaagaacatagggtttgaaggaactaacactagtgtatcttgaagtgagatgaagataaagtcaatatgtatacagtcatgtgacatcatataagagagcggtcacatgatccatatcgatatcgatatcgaccacgatatcttcatcactcaacgtcaaaatttgagcaagcagacagcagggcctgaaaaaacggtttaaagtatagatctccattgagatcctttgtcgggattttttcgctattgataagcaccctcaatagcgtattccgaagtcacacgccattgatcgctattgtcttgtgattccctattgtcttcagaggtcaatacggaactacttctcgtctataattaagccttgaaactacacccagccttcaacctctcaccaatctctctcttctgaaactgcacaaattcttcgatacatacataaaatcatatcatccataccgatataggtatcttccaaggttgccctcaaaccctccggctttttaaaaacagctttctcgccacaatgaatgctccagatcggtgagtgcagattctcttttgcaatccccaaagtcttgttcatttccagctgctctggtgaatttggttgttggatgtcatatgtactacagagcatatttcctagattctgggttaaattgtgccttccttttttcatatcttgtcaatcagggaaggagctatggacatggatagccaggatggcactttcctcgcaccgctcttgccctggcaatcatttcatcttgcctatttataccgtctcctcggtcaacacatcttccctctttcatcctcttgtttacccgtggactgtgatcctgttttacactgtcgccctcttttttactgtgtatccctgtttcatcgttctgttttgtgcagccatgcagggccctggatttatcacggccactgcggctatcgccagagagtgtgctggtcgccgtggtcgcggtcgccactcgcgtcaccctcgccctcagaaccccagcgatgcccctgatgtgtcagtgtcattagctctcggattaaggcctttgcttcattctgattttgaccttcttctgcattctcatcttgctttttcatctgtggaccataaactgaccaagctcatgaatatagttatgaagccatcttgctcgctcctggcgaaagcaagattgatgttgaggtcgacacccgtaagtcatgctggtcagtgtacacgacacaacctcactaaccatctctctctaggcctcccttctgctgccatattcaccttccgcaaggaagaccacacccttggcaacatgctgcgtcaccgtctcctcaagactgcccatgtgatctttgctgcctaccgcgtaagcaacctgctctatgtgcatggtgtttcttcttggaagatactaacaacaatccattaggtccctcacccgctcacccccgagttccagctgcgtatccagactgatggtgaggtcactcctcgtcaggctgtcattaacgcctccgaggctctgatcaaggacctgggcatcctgtctcgagagttcaccaaggagttcgagcttcgcaaggctgccaacgccgccaatcagcaacagcagcaaagcaccgctgagtaaatggttatgagtgacacccagctatcatccatcttgttttaactggtctgaaaatctggcgcatggagcagtcatggtgttttatgccttgcgtttgctttcttttcgttttcaatctttaagggtggctcctttttgcgcgggcatgtttctttttttcaataccatcagctatttgctacccacaaatctacaaatttacaagcttgaagctctaatcatcacttgtatccatcaaccaattattccagttgtagatccaaaaatatctcgaatgactaagcaccagatgaggttagcgtaggtgcctccgcgtccagcagcggcgtcattcgcatcctcctgagactcaactcacttagaattttgcattcgtcaatttcttttggcttttctgcatctatttggctcatgcgagcgtggtgtctgtgatgttttcctcgtcgaataatttcctcgggggtggtgccagtggcggccaggcaccattcatgcaacagcaacaacaacccccctattcacaattccctcaaggccagatgtcgccatcagtccaaccccaaccgactggatttcctctgcagcctactggtctcgctccacagccgaccggattcgccggccagccctccccgttcggtaactcgcagctacagcctcaagccaccggattccccgcaggacagctccagccgcaattcactggctttcccggcgccgcgccccagcaacctcagcagcagcaagcgcaaagcttccaaacacaatacactggataccctccccagaaccaagcgcagcagccgcctccggtgccgcagataccaactcgattcaagacctccagcgatatcgcgaactccttccaagatgccgctggctctggggcgccccctcaggtgccgccaaagacaggatcaaagatcccaaacattcggctttcttttatcacggcacaggaccaggcgaggttcgagcagctctttaagtctgcggttggcgatagcaagacaatggatggtttgtccccgcgcactcaatatatgatatggcttgtatacagtactgactggtcacaataggcgacaaagcaagagatctattgttacggtccaagttgacaggcggtgatctttctaagatctgggttttgtctgatacgaccaaatctggacagttgttcttccccgaatttgcattggccatgtacctctgtaatattcgtatcaccggccgcgagctcccttcttccctacccgagacggtcaagaatgaggtttctagtatggttgacatcatctcgttcgatgtccccgacacacagccggcggtccaacagcggacaaacgtccccaactttgatgcacctctcatggagaacaagtcgacgcccccaattgttcagcaacctgtcccgcaacaacccaacaacgcccagctcctatcgcagctgacagcacagcctactggattctttccccagcagacgggtatacagcaggctaacccgactggcttccctggccagaatcagcctcaattccttcagcctcaacaaaccggtttcatgacgaatccacaggccacgggatatactggccctcggcctccgatgccgccaatgcctactggttacggctcgaacctcagccctgctcagaccggtgggatgcaaggcctgggtgtgcagcctacgggtctggtaccgcaacctacgggtataccaggtcaatggggattcatcaacacaccatcgcaaggtttgcccaatatcgaggctatgaagcagcaactcatgccgcagcctgggcgtgagggtggtttcagtgctgttggtctttcgggaaatgctacagttgcctgggcaattacgaaggaggagaagaagatttacgatgatcttttccgtgcatgggacggtttccgcaagggtttcatcagtggcgagactgccatcgagatcatgggccaaagtggtctgaatagaaaagatctggaacggatctggaccctggctgatccccacaaccgcgggcggctgaacatggatgagttcgccgtggctatgcacatgatctaccgtgctctgaacggatacccagttcctagccgtctaccacccgagcttgttcctccttctacaagacacttgaatgactctatcggtacagtcaagtatctcctatcccaggatgctgaaaaccgcaaggctacaggcgcgttcctgcagccacagaagaccggtgtcagctatcttaaagatcattccttccgtggtggtgcagcaggctcttctggggccagtcgcaaggatgcgacggttttcaagaataatgactccgctggtggataccgctctagtgcacgccgtcgcgtggctaacgaggctcgtaccccgtcaccggctgcatctggcgcatccgaggaggagtactctgtggaacagctgaaaaagaagatccacgaggccaaggtcatgattgatgctgccgacttccaggatgagaaccgagccgaggatgatgacgctctagaccgccaggatcgccgcgaggcagagagtctcatggaccgtatccgtcgtgtacaggacgatctcgatactcaccccaacgcctcattccgtcaagtggacagcggagcagatcgaagggctcttcgtcgccagctacagtcttttgaagatcaagttcctcaggttgcatctgatgtgcgtcgtctcgagcgtgaaatcgcggacgcgaggcttgagctcttccgtctcaaggacgccaaggcacaccccggtggtgcttctaatatcattggtactggccctggtggcactgtgactgaggcagatcgcatcaaggctcgcgcgcgtgcgcgtatgcaagcgcgggctgccgagctttctgggcgtcccgcacccgcaacggaagatgacgatggccaagcggctcgtcgtttagagtccgagagcaataccgtgaagatggagcgggagcgcaacgacactatgactcgtgatgtcgaagaaagtgttcgtgatttcgctcgcagtttggaggacagtcttcgggacgagggccaaaactccacacgtgagcatgagaagcgtcgttgggaagatgcattgggagttgaagacgtcatccgcgacttcatctatgacctgagccgcaatgcgcgaacagcaaatgttcgcaaagaagagtatgttattcttatcagtcaggaaaagtattcaacgctgacagattatagacgagagagaccttccccagatgcgcattctcgagcatccccagcggccgaatctgctgctgcgcgcccttcgatgcccacatccgtgcactcgtcaagctctcttcctggtaacacacatgaagatcgtgtcgcggctgctcgggagcgtgcacagaagcgcattgctgagcgcatggcagctgctggtctgaagccaaatgactccactgagactcttgcgcaacgccaggagcgtgagaagaaggagcgcgaagatcgtgtcagacgcgccgaggaagaggatgctaaacgggaagaggagagacagcgtcgcttggccgaggaacgaggtgttcctagtgatgcagccccgaaggctgcgggcaagaaacccccaccggcgccgcccacccgcagggctcggacggatagtgccggccaagccgatgctaagaaggcagaggaatccgctaaaatggagcaggctgcccgcgagcaggccattaaggaagaacaagaggtgcaggaagccgagactaagcgtctagagtgagtaatctacagccggtagagacaaaatgagcggttttggctaatacatttacaggagtgaggcaagccaaggggagttggatttccaacgcgagaaggatgctcaggctgctcgacttcgtgctctcgaggaacaagtccgccaaggcaagattaagaagcaggaagagaagcgccgccgggaagaggctagccgacaggccaaagagcaggaagccattcttgcagcccagcgcgttgaactggaggcggccaaggaacgtgagctacagctgcagcgcgaactcgagggacttgacgagtcatcgtccgatgacgaaggccctgccgatattacgcctcagtacagcaccccgacgcagagccagaccctccctaccccgcctcctgtgcccacaatagctattcctgagcctcctgcccccgcgatagctattcctgagcctcctgtccccacgatagctattcctgaaccacctgtccccgaaagcgtgcctagcgagattggctcccccgaaagcagccgtggtgttcctgggctcacgcccgacgctgagtccaaaaacccgtatttcaagaacaagagccaaccatccgaccccatccaagcgacctcgccacctgccacagctcagtctacgaatcccttccaccgcttcgtccagcaagaacctatcaagcccaccttcactggcgcagcccccctggaacgtaagactcgtgctcgcccggaggaagacgacgactggtccgctgcgggctctgacttcgattcatctgatgatgaggatgaccgcccaaccggcggcagcgccaaacaacttgctagcatcctgttcggcactatggcacccccacgtcctctgagtgccatggacgacgacaaatctgcctcgaaatctgctaccccggtacaagaaagtccaattgcacctccgcccccacccccagcaactctgcctcctcttcctgctatcccaagccctggcgatgccgtatccccatcacccgcgccatctgcaggagctccacctccacctccacctccgcctcctcccccaggagctggtgctccttctatggccccgcccccgcctcctggcggagccccctctgctcccccgccaccaccgccagctggcatcccacctccacctgctccccccccccccgccgnnnnnnnnnnnnnnnnnnnnnnnnnnnnnnnnnnnnnnnnnnnnnnnnnnnnnnnnnnnnnnnnnnnnnnnnnnnnnnnnnnnnnnnnnnnnnnnnnnnnnnnnnnnnnnnnnnnnnnnnnnnnnnnnnnnnnnnnnnnnnnnnnnnnnnnnnnnnnnnnnnnnnnntgcccccccggccgcggccggtggcgctggagctggccgaggcgccctccttgcgtctatccagcaaggcaggaccctaaagaagactcaagtgaatgatcgtagcacaagctcgtcggcaggacgcgtgctgtgaagagggaattggaaagtctttatttttattttgagagtacatactgtacagtggcgaggggaaagacatggccgtacctacatgattggggagtaaggtgacgaggtctatggataatggtagtgtagtaagcgagtagttagctgcgtttttgtactcttcttggaatactcatcgattttgtttattatcatcatttggcctaacattggaagcaatctgtctataagcgccgcaaatcgcgttcattctaggggttgttcacccgaatccttcaacatatccgactgattaagtactccaaagatagtcccggaggtactctagtctatctagccttctgttttggattttcctttcctagttgttgggatttatgtatagggaagttgttccttgtcgactgcctcaacatctctaccctctatatcactatcatattcaaatacatttcattcgcttgtattgatttagaaccccggcaccgatactctaagatagaggccgtacactctgctggttatggaaaacatcatccgggtttaccgcagccttgacttgacctatagcaccggccactaagccatgtagactcaatacatagacctcgatgaatcttacatttagaaatggcaaacacgccaagattggccaattgaagcatattataattccatattcattactttctttccacgggtcttcgaaatttgataacgacccccattgttaattaacatgtatctatcaaagtgaactaggtcactttttaatcatctcgtttcccctgctttcgtaatcgtaaatcggagtagcgaaacggaggcataggcgcatatgtagacttcattgaatctggaaattcattgggactgctgtggcttatggaagagcccccttcatgaatctccctgtttccatcgccgtagtcatgaaacacaagtatctcttgcacattttcttctccaaccggtgcatctgcttctgaattggagccaggttgtgatggcccagaaatatctgttcgtgtccttgacagaggtgacacaaaagtctttctcgattttatggaagacttcttttctgatgatggggtggatgtgcgagctgaagagtccagaatgtcttcatttatcaaactctgagcctcagaaagggggttttgcttgatctgatttatggtgacgaccatcgattttgtattcacgaccaactttggctgagtgctggtaccggagaattcactcattctctcagacaatcgtcgcagacatctctcttgacgatttatcacccgcctgagctgtttcctagagtagaattagactatatcactctgtattcgttgcgaaaacatgggtctcacatttgcatcttgagagatttcatttcgctttttgagacagatggtttcttcatttctctcaaacggaaatcgagaatgagcagacagttaagcgctgttagcgtcattttgaaactggccagcgtgataaggggaagctggacctcatccttcatccagtgccaccgaagctttgcgataagctgttcaaatcgactagcattgctttgttttcttaaaggcccaagcttcagaaaaatttcaccgatttgtccaaaagcgaaagtggcttgggaattgagagtctcttccagcttttgctggcgagcgagtttcatgaccctgttgtccagagggccactaatatggctgaatatcccaaacaggctcttgcaagcggatacctcatctgcgagaagattgacctcttgcttggcgaattggaaggtatgcttgaggcggtgcaatcgtttaccacatttctctagctggttatagatcgcgaatattgatgataccgctccaatggcttccattgcgaatattgccttccttcagtcagcacacaaagccattattatactttaaatacctaagctgaggggtaatgaggctcaacgctgatgacagaagaaccgtgagaggattcagtgagcctatcagagtaaaacacgacgttcctacatatatagtgccgtagtttgcatcacatcatgtctgtgcgcatatattggttgtgcatactacgagtagattatcactctccaatcaatcagcttattcacattgattaagagtccttagggctcgaaaccaaggtctaactgtgactctgtgttagagagaaccgctacgtaccaactcaaacccattgaatgggagcggctctccatgaacgcgaagttgaaagctgcgcattatacgctaatgtgaatatgattacagttcgtaacatgtttgtttgtttgttttcttgggagagggagggggatagtgagactcgatgctgcgttagtagaggagccaacgataagagggcccgaggagcctatcaaagtacaacacgatgttcctacatgcatagtgccgcagcttggatcacaccatgcccatgcccaacgaacggagccgctgcataacaccaaccaagcaaggtgtttacggtagctgtgccacgccaaggggtaatcgttgttcaagctgtaagttctatttgaactaatcattttcaccaaagactgcgagcagtgatcacgaaagagggcagcatgagataaaaaaaaacaatcaagtccgtatgttcagcagtgtccctggacatttgagaccctcgcagccaggatcacgggtaagccttgccctagtttgaatggcagtgggtgtggtttgatggtggagggtctttgggagttccttccaatgaccctttcaaagattttgattttgactttgacaatttcatattcgggcctgaggacttcggagaagggctggcttagtggagaagttatctggtaagactggcgggacaccctcttgccctacgtgatgtggtctgaaataaattgtgactacctgctacggcagtcttcaaccaactcattttgcccgcagtaaaatacacaatacatacaactatacacactagtatcaggtatagtcgattggcagggtctgtgcatgtagccattggccaatgaccatgcttgcgttgtttgagaagtttgcaagacgtctcgcctcgatcttcagctcccccgcaatgtccccagatccacctgggttttttgacccacgctgctgacatgcacacttgtgacgtccattacaactgcgcctaaggagctatcggtatagcttttgagaacgagattgaggagctggttggcgaaagtcaccaaccgaaagctacagggaaatgatacggacacactattgtctacaaaataggcagctacccctctctagcatcattcaccaatatgttcgccctatcgcccaatcaccacggtctagcaggcattcctaactacctactaatatctgccaaactgcattcattctgcgctttattcttggcttggacagaagctatcgtcttcgccctttttcatctgctcgaacgccggtattcttcaatatgagtatcgaaaaccaggaatactcagttgatcaagagattatttctttctttcaaaagacttccaccgaccgctcgtcctgtgatgatcgagcacggacacttgtcggaggcactgtgacccccgttgcagtgcaaggcgcttgcagttattctgtatatgcaggtctagagtatgtggttcagttccgactaaggtctcttgggctgaagacagaaattacaaatattgcccgcaatgtatatgggaccctagtgccctccgtctcttatcacggtcagattgggagagatgatgtcagtgggaaggaatctctctttgtctatgtgatgagtcgggtggaaggcattagccatctcgattttatccttgcgcataacctcccagagaattcgccagagtactttacctggagagagaatctggtcttcgacattgctaggtatgtttagagtgagtgggctatattattgataatgatctaacccgaaaggttctttgctctcacatggaaaaacccgcagaatgtcgaccgatccttttgtgaaaacctcgatcaaagatatgacgaagacctacggcggctcttagctgctctacctgatcgcttccacccaatcatccaacaatcgattgacgctctacctgctatattttcgctgtctatggtccttcttcacatggattttggtaatgtgcaatatcatggttgataccgacaataaccatctggtcggaattatcgactgggccgaagcagagattggtcccttcggaacgaacctccattctctccagcagttcatgagcaaatatcgccttggtgttggctggattcgatatggtagctatgacactttgaacaacttttggaatatcctttccgcagacactcggggtctcgagaaggagacaatccgaacaataaaatctgcaatgattgtgggccttttgctttcccatggatttacaagccgccttgccaacatgccgaagcctgagcccatccgcgacgacaaaagcggagcttacaaaatgcttggtttggatggtttacttatcgttcctgctacgagtattgtgaattagaggtttttagtgacaagcggccatatgttgggatttgaaatgaacgagtgaataagctatctagtagtgagccaacccgtaagtcatggagaatatctgtacatactatgtattgggttagattgagtgatacttatcagggtgttcccgtctggagccatggaagtggagatgagtaccccaactaggcacggagttggaaggagtacggagtgtaagctgtttggttggcttggcataactactggccagagcaattctcagtgggggaagttgtgactattagatggcgcttgctttaggtaaacacgcgttatgaagttattcaaccttggaagaggctggggaatatgtagtaattcagctaaaataaggcattctggcatcacaatccccctaaaggagatcttgaactctcggaattgtaagctgcaataggatacaccccaagctatgagacgccagtaaaaccaaatgtataagctgttgtatacagaatctcggagttgagtgaggatgcatttcgtatatcatagctctttcataattatttcgcatacacaaagactatactattggcatgcgataagctgtacaaactggaacgcagaaagaaaaacaccgacacaatgactgaccaataccaactccaaaccaaaccaacataaccgctagaccaataagtcgcattcttaattggtgcgtacatcttccaacactaattcacaagacaacttccgcaatcacattgcctagggtactcacacaccatacagcgacaagaccccacccaatccggcgatccattctccaattgttcaaaggaacaacaatcaagagcccaactaggatgaccagaagcgtcgcgccgctgataacaagcaccttggagatggcgatatcatagggggcctgcacaggagcgataccttgcagcccctcattgtgtctctggttcccgccattgatggtcatatacagaccaccaagaccgatacccaggaggatgttgagcattggtccaccgaagcaggcgctcaaagccatgaccggatatccgagtcgggcgactgtgatatcagcgactagatcgcctagcgagtttccgacggcgaagatggtcaatccaagtagggaatcagagatgttgaggataactccgatggttttgaggagagacacaacttctgtagcgatcgtcgcgatccaggatatggcgactaggaagccaagtagggagaggaagggccgccattgcggtgggaggctgaggatgtcggtttgggatgtacgcgggaggaaagggatggaaagatcttcactgggacgtcggtggtttcgttgacggcgagtgcttatgatcagggctgtgagacagacggaagagaataagagggagacaagggaggggaggatgaggttgcgcagccgacgatcttcgtccacggtcgtccaggtgatgagcacggcgaagaagggacctgtgaaaagctggatggaaaccagccagcgattccagtcctttgttggtacaggatgcgcagaaggtgaagctggcctcggcactgccgggagttccgagtcccatcgcgggcgaccagtgtgttcatgaaaggactttcgatggtggtgcgttggcggcgcattagaagctgacccggcgtagtcatgtgcctgggccataatcactggactatcggctggaagtctaacccttggggagggatggtctacatcgctgacgtcctgaataatcaccgagggtatgggatccagttccaccgactctggtgcctctggctcgatgacggggaccgttatggtaagaagcagcacactaggagctgcgataataccgagcagtcgttcccaaacatttttagacttccagcccgccagggtcgggaagagcgtgcaaccaatctgctggggaggggggatcgagtcaggccaccaattcctcaggtatttgggaaaagggaggcctacatgagcgaaatcgtcatacccatcgtgaacttgtagcagttctaactgactagctgaatttggaagtcgaatgctgggtggtcgtgagaattccatggagggtatatcagtatacaatgggaagggcactgaagggctttctaacccaaagcctgaatgacggcgcgtcgtattgcccctgggagatactgacattggggaccgttcatttatccccccattgttgtaattgggggaattaaaaacgtctgatggggcgagccggtcaggagtttgaggacttggcgaccgattcgcacgcgacacatccagcgccatcccagtatcaatttgagggagatggcgcgaccgcatggcttcttgtcccgaagtatcctcaaaagaaggtctgctcactgtaagcagtggaccctgtgttggtcggggctccaaaacactggagtcaattttcaatcccacggcatcgttcgccgatacagctcgaactcgagaggaacctgctgtactagacggcgacaggcggtcgttagtggcagatggtcgactggcgcgaggatgcgatgccactgagcgtgtgtcaaaatcggactcgtagtcgtctgaatagctgttcaggcttattgacgtattgcgattcgtgtttctcgatttctgcagcgagtgtagaacagactgaaattctaatgccccgacaagacttgcccgaatgggattcattgtattacgcctcgtttgcatgggccgatagacgtgcatgttatcacgaatctcggccaagtaccggtttcgtgtttcgtcatcctcctcgtcctcctcgtcatcttctttccatagaggaacagcctcagcacgctccaaaatatcaaaatcctcagttgaggctccgcggagcagacttcgtgactctgacgctacaccgggatcgtcgtcctcgatggtctcttcgatctccagctcttggttttccggtatatgaaagtgagctcgcgctgcgaggtctctctcgtgctttctgcgtcgccgtaccatataccagtgccacgttaccaccattacgacatagaaggcgtacaagcctaccatcgcagctgcctcccatacatgaagtttcccatcggccaacaaaaacatgctgaaaacgacggccactatgaagtagcccacgtctcggacgaaacttctccgcgcgaccttgaatggccgaactaatgccatggagcccgcgacaacggacgtgatgaaagtggccgcgccgattaactcaccgattgccaagctcccactattcgaccgcatggcggcgaaagtggaaaacacgtcaggacttccattgccaaatgcgaggaatgtcacgccagtgagactctcgctcaatcctagaatgctagccaatgtactcagatcgatacacaagaaatcgcttgccgcgatacctatggtactgaagagcatcgataaccacaggatcaatatcgcgaatgctaccggttttgcattggccagcccgcaatagtagaattgaaggtaggagattagaccatcctcgtgatcggggcagttggcgcggacgtatgcacactggtttttgacgttgcgaactaagcgacactatcatcgtgtgacagaacatcaattagcctttggcaccatctcacagggaaatgattcgggaaggttaagatacctctagttcgccctctcgtttgagcaggtttatatgcggccctgtatccggttgcgcaaactgcccatgttcatttgtagtaccagttaggaaccaactcgttattgcaataagtgtaaacaccaacaacgtggtgtaaaatggtcggattgaatatcgtggcttccggacggcaggctgcaggaaggacagcagctggttcatcatgacgagaagtatggcggcatcgtgagccgaagactttggatgctgtagacaaacttatgccggaaatatcaacgttgaatactcaatgcatgtacaatatctacctcacgcatccaacagatgtgggtttgtatatggcacggtgagtgcggtgagtgcggtgatgtcagctgagaggagctgtggcggagctcgggagtgggccaatgcacttagtccgccgatcgttgttgcactgaggaaacaggttaggagggtcgatcgcagatagggttgtaactagtccaagataagagggtgagaaagtaggaattggccgttgaaggttcaaaaggatggaccgaagctaagcccagcttgggtacaaaagtaatacctgatattccaggcatccacggtccaggattacgtgatagatagtgcgtcaccggtacatctggaccaccgtatgtttgttgacttccccatttgttttgtctcatcgacatcaacccctctctccatagaactttccatttcaacgctgttatcgccatcccctatcgggggcaaccgcaaccatgccgcgtgtcgcaaacaaggtacatcgccgctctaacggcaactcgacgccgcacaaaaacacaccggccaagtacggatctggatatctcctggttatcgcattgaactaattatatcaggatacccctcaacgatgatgagggcgagaaggcagcgcgtatggaggctcgtcaagcacttcatgatcgccaaatgagtcagattaaagcggcagtcaagacgcctatgccaccccgtcggtacaccctcgatcgtgaagagagcgacagtcccgtaactcctcgagcctcacatcatcgcagtcgcaccagcgatgtcaatggccgtgcagtgacaccgatgaagcgcgtgcctatcttggccaattttgaagaatggatgaagatggcgaccgataacaaaatcaatgcgaataactcctggaactttgcgctgatcgactattttcacgacatgtcattactgaaggaaggagatggtgtaaacttccaaaaggctagttgcacccttgacggttgtgttaaaatctacaccagccgagtggacagtgttgcaacagagacggggaaacttctgagtggactggctgatagtcgcgacaagagagggcgcggggaggaggatgcagaggatggcgatgaggatgaagaaggcgaggatggtcagcctcgcaggtcgcggaaaaaggtatggtctatacggtgtcagagatttgggattttgactaactagatgtgtctagacacgttcccatgaggctaccctcgcgccgtcattttcgtcattgcaactaaagaagttcgagctagagttcgccgtggaccctctattcaaaaaagcatcggcggactttgatgaaggaggcgccaaaggcttacttctgaaccaccttgctattgatagccatggaagaattgttttcgatagcagcgacgatgctgtggatgatagtgcaaaaacctccgaagatgaccgtcaagaatctacggatcctgaccagcagaccgatgaccaagcaaaaccaaaccagaaacccgcaagcgacacatttgagaataacacggagatcgaccttgctacactagcaagccgatttttcccagatctagatcgcctagatgaacaagatatttgtccatcgcttaaaaacctcgacttgggtgaccccagcgggtcgctggatctccctctcctcaaagcgccagaggaatggcggcaagacaagatggacgaagatggacgagcacatgatgacccatctggtatcatgctggacgacgacaacgctgtcgggtttgatgacgatgatgctaccctagccggatttgatctcagcggcgacactgggtttggtgacggaggagaggtatgggctcgggaagccgccttggaaccaatgttgaatgttcaccggaccacccacgatggggataatgatggtgagggtgacgatggcaatgaagacgcatatgccatctccatgtctcatcaaactaatagtcacgaccacgagaatattcttagctactttgacaacgcgctacagaagaactgggctggcccagagcactggaagattcgaagaatcaaagaacatgccacacccgctacgtcggcgcccaagcagcgcaaagaaaaagagccatttgagattgatttcgctgcccctctggatcctgctgtcgcggaattgatctacaccccggccagctccaactccgccgtttcattacccaagacgcagtggaaaacaaagggtcgcaaccttcttcccgatgacaagcatttcaactcccgtaacctactcacattgttcctcaagccgaaggcaaagatgggctcaaagaagattttgggcaaacgccgccggcaggatttgacggctggtaatggagatatggacgaggcattctgggcaaatcgcaagccggaagaaaacgccggcgaggaaggtgctgcaggtgcctatgatgccaatttctttgctgatgacgatggtcttgctttcccgaacggcatggatctcgatgacgacgacaatctaccattcgcggatgcccgggagatgctctctccgccagcagacgggactgcaggcacatcggctggagaagcaggtggagcaactggactcagcgcgcttttgaatatggttggcgccacgcctggccgaccgggagctggtggctacggatcgcaattggtgacacaaggcggtcgtcgtgcacgaccagactacgtggcgtatgcacgtgtcgcaaagaaggttgacgttcggcgtcttaaaaccgagatgtggaagggcatgggtgagcgcctggttgatgcggtagactttgcctcagcttcacagccaggagccgtgtccagtgatgctccgaccgaacccgagagtgaatcggatgcccctgtcccgcctacacccaagggtgaaagcccagagcaggtgggtggtcggctacggttcacgcaaattatgaactccctcaaggaagtctacccgactgagactctacgcgatatcagcacctcattcgggtttatttgtcttctgcatcttgccaacgaacagggcctcgtgctggagagtgatcttagcaagatgggcaatgatgcggctaccctagaggagatcttcgtaagtagggatacgcacgctatcatcgaagagggaggagggatgtgaaagctctttttttcagttgcatgtacagttgacatgggtagaagcattacgatatgcatgttggtcacgagtgatgaacaggacggtgtgacttggtagatccttgcggcgttatggttttgctttttcctgttcgcagtgaatggcgctcttgggtattttcgcctcctggaattacttcttttgttttgatgaattcaaagaagttcatatactttctggtataatgcttaaatggtctcaagtcaaagtaggattagtttgtcacctcaagtgttgtatgccggcacgaacacttgccgatgctaggatgaaaatctgaggagcacattcatatgtatcattgcaatatattcatttgttggacaaaaatcaaaaatagaaagagagtaaatacacaacagtgtaccaaagtccaaataggtatctgtatctcacaccaagactccacgcgtcctagggtgtacattaaactccataacgaggagagagcaaataaaagaatgttgaacaaatgtccgattgtgaagcagatcgatcgaagatgacgacctgaattgtagttttgggattttccatgtttttttttttttgtattttcgttgttcttgggcactttcattccccaccagggaaaatggaatcgaagcaaaacaccctaagtcaaaagatataaaagacaagcttgcagtcatccacatttatttgcgtgcaggggccgggtacaccgggacggtggaagcctgatacgcgccgggaatcggcacggaatcgtaagtgcactcactgggaggagaaccccttttcataggcggactctggcgctggctgtgaggaggtggcgacggcgaataatgagaaggaggagcaaactcctcctgggcagtctggggggttggctgctggaccttgataggaggcggctggagttggaacgacggggtaggccgggtaggtgagcgcggcgaggcatactgagtagtttggggttgagccatgcccttctcagcagccgagtaggggtccacagggccgacggcgtagattggggtctttggagggtaggaagtgaaacctgtgaagccgggggtgttcggggcagattgcaggcgcagttgtgcgagatatagatctgaacgggcgttgtcacgggtgtccatggacttcatcagcttgcgcttgctccagacgcggtagaagactaccacgtagatcaagataactaggatttcgatgacgatttcgatgatggcacagacgaggccccagtcttgtagacgacaaaggagagcatagtcgacgctgttgtggtagatctcctcgcgggtgttctgcgcgcaggaccatccccacatgtccttggtgtttcccgtggatttcgagtgctggtaaattgccgcgccgacgacccacatgatcaggttcacggcgaaaaaggcgatcgagaagctggtgtagtagacggcggccttttcggcgcgtccgtggccgccctttcggtaggcccagaacacgatgagacaggcgactaaggaaacgcaggacattcccagaaggagatactgagcccatgggttggttccctctgcccaggcaggaagactgttacgagtcggcaggtgcttggttgcgttaaaaacagtcaatgtcacggctaacagagacagcacaatcagactgcaaccgaaattgacgcaacgcaggaagatcttggcgattctgacgcggagtttgattctctggtgacgattagtaaatagtatcgattggcatcgtgggctttcttaccaggtctcgagcattctcgacttcagccttcttttcttgcttctcaagcatgtactcctcgcggaaagttggactgagcggatttaacgacttggccgtctgcggcaccttcaggtcaggtcggaaaggcgacattggcacctggtcattcgcatgctcattgttcgctgccacataaccgaatcccacatctccaacatctcccttcgcctgagacttgggagggtcggcgaaaggtgatcgtccagcttctgtgcgatcaatgggagagtgaattgatgtggcctcggcgaatcgagcagtgcgcgggctcttgagcgaagcattgctcgtatcagagtcgctgcgagtctctcgcacggtgtgttgtggtggaggacccattgcactgtggtaagaggcacgggtgagatctgtaggaacaactggctcgtaggtcagaggggagttgtctcggctatcgtctgataccgccattgaatggatgagcaatgcaggcaaataaatcaaacaattaggtcaagagaaccagctcttgacgaccactggactgattgttgggaatagaacgaccctaaagtcgatacaccaagaatcacaagtgtggtgggacaacggctgagctatatcaccgctaccgtgtgcgaagcctgcgtacacgagtattaagtagcagatgatcgaaaacaaaaaaaaaaccaagataatcagaaagtgacaggaaccagcctgggcacctagaatatcaataatgttcgagtgcaggcatggcccgagaggcgggggaccaaaatgcaggcttttgattctcatcactcgagttgggccagcgtaagcgccgaggaggaatttgcaacagcgaccagggacatgattggaagacgcaaagcctgtcaagccctcttgctgcaagtgcactgtacctcgatgcttgagaggggagtgtgactggccgacgggagtgatcagccaagcttgtcacggtggagtaaccggccagtgagattgtgtagcggccatgctcactcctcacgatgcacgtccatcacgtccatcacccccagcccggcgctaatccgccgatcgtccaaccacacagaatgtagaaccgctctactccgtaatagtgtgtgagagagatgaatgagcggtccgagggaagatgtgactggaggtcaacccaaaatagaggtccagtcacatacgtcgattaagcacctttggatgttgggatgttggagaggggaaaacaccgagggggtctgtgcacgctctgctatttttgccttgaagcagagcgtgtcacactcgtgatagtgatagtgccctagctcatgcatatgtctcaatcctgccgactagcttttctggggatctctccagtatcccgtcttatttttatagaaagtaaattgtccacttatcttgtcataccctattcccgtcttccccaagctcttcgatcttaatatagaatctaccgagttttatatgatgagcacgataattcctatgcgtgaataccaagataggtagccgcccggacgggaacgccatttagttagctgcagatgtgcatatcacgtcagcccagtcaagagccctggaggtacctcggtatcggtatccctgtactctctttcgcattctcttctcttaatacctccagttctccccctctatcaatgtctgtcagcttcatgaagaaaaagaatccagtgaatttgtcgctttcagtcaactactccgtagtcatatcacagccatatatcgaatatctgtatgatgggatgctccataaaggaacggtttaaccgccgactagaaaggcgccaagctcgcaagcaactgatgttttcttcatcatcaccgaaagagataggtgcatctatgataactggctggccaaaagaagccagagtcaatgatctcaaaatagaattgaaaagcgcctctgatatcatgactgggcaaagaaataccgccaataagatttatcatgagagtactatgaacactctgattagtattggccgttttatgttgatggctaatacatggcccctgcccaggtgcgcattccaggacatattggtacaatacgtacttccggaattcactacctacactctttgggattatacaattatattattttactacaaccatggcatcaataccaccccaacctggaatgttatttaaagactgggctctcgtgatctgaacagagagcttccagccacccaagacggattcagtgtccgagatatagctggggagtttgtagatttggggagttgaattcggccccattgggtagactatataaagccaagatacggttagagacggtatgattcgtaggcgcattaagttagccctggagttgctgtcaattacctgagagatcttatcttttgtacgatctgagccagttcagattgatctgccggattcacgccatatggtgccggtgttgccaacactgaatccagaaaaccgaaaatctgtttattcttgttagatgtatttctctatacgatacctctggaataacggagtggatttgggttacctgggatcttttccaagtataaccaactcttagatccaaaaggccaccacatgccggcaatatattctctgcgaacgtgctcggggcatgcgggcccaaaccccctggtgtaacgtgccaggtcttacaagaaagagtgcattcaattcaaaataactaagatgaggagagaaagaagaagtaagttgtgaagtgggaagcagccagttattatagctgaccactttgcaagcgttgcaaacaaccaaccttctcgcttagctactaacaaacaatctatggaatgcaaactagtaaattatgcaaacagtaagcgagcaagcaaacatgaagcataatgatagcgatccatgtggatcgtgacatacttaggcggttgctcgagcggttaacagagcagtttctcaagcagttatataagcggttgcccaagcttagtttcttaagtagttgctcaagtgattgacgatgaagcaattaataatgatatgacaaaagggacttaattttattagtggtttacatacaaattgtaggtacctactgtcttactactatcatatgacaggaaatatgctaattgtgaatgcggtactgaaattacaggcaggggggagaataagccagtcagagggtggctttgcgtagcattagaagttggaatcagtcgccttgctctgcaacgactatctagagacctatggccgtcgagatccctagtatattagagactaagaaagcgagctatgatgtagacgatgaagactgtgagattgcgccctcaaaactgttgagaacccacttcactgaacataagcacccgaagtagagtcttataatcgtttcatcactgaaattatcttccgtatgtctgatatttaaagatgacttgtctaaaaaaagactttgacgtcatcagtggcgaaaaaagccgcgcatcttttattgcacctagcgagcataagagaccgatagacctcttgctgtcaaattggatacagatgctgtatttgcagtctaatgagacttgctgagatcttcaaatgccaaggttgtaatggcaacatgtgcctcggaatacttagaaacacccttggagtgattaaaatacaacagccggcattgtgagagaggcgacttaagaggtggagtgttgcccacggaggtgatgagtaggcagcaactgtgttccataagcgggattgctttgggacactggccaatcatgtcgtacctcaagcatacactaggtaatgagacatgagtatgtactccgtacaagaagtagtattagttggggtatctgccaaattcacaagaagggtattattccagaactattttaaaatagtctatagttggtcttggcattagggtggcgagaccgatgttcagaagcactgtggtcgttcataggatcaggagatattgtccgtgccaaacctcaacagcccctggaccccgtttctacataacgtacccatggatgttctaatataattggctcgagaaacaatgataccaaagaatgacacctgctatgatggtcaggatacattgacagtcataaagttcccagcagaggggcttgagggagtggcaagagtggcaactgcgtgaacatatatcctacgaggagaagacaatgtttaggatgataatttgcataacgagaatatatgggaagtcgtatctgttataagagatgatatagttaatgcttgatctcaacgctactgtcggtagaatatcaatcctctcgaccacatggactgacagaaacgttttaacttatcggagacttggccacgaagcttcccgtttcatgcaggtatctagagtaatatatggatgacaagtaccagccacaggttatttttgggagtggagtacgcagccgtcaaggactgaacaaccttggaaggccgctagaacactccacaggggttccctggttctgaatataatgcgttgcatgatagattagatacagctgtcaatcaccgtaggttaaaagaaacggtactctctagatgctcatggacctttgtgccttggagactagctacatagtatatatgtatgtagttagcatgaccggcgtggtactgtgccatggggctctgcgaggtcgatcccccagccacctgaggcgcctaaaacgtacaacgttataagtacactgcctgaaacatggcgcagcaagtgtgttgcgccttgtgccaccagggtgatcatgggcaatgggcatggacatattaataaagtaattaaagctgttcaagaaatcagtacattacatagaacttgcgtgtattgtatgtagtacctagtgggtacatcggcactacagatctccacaagatcaggcgttctactgaattgagaattagaatgtattacatacaatatattatacgcgggtctccggggtgacatcagtccgattgcccctgtatatgcactccataccaagaccatggtagtaatagagaaataccggtttgaagtgagatgatctcataccgtttatacttaagcctcaagatgtcgatcgtactagatagatttctaaccttttctaatgaatgtaagtgaatgcaattgcattgtaaggcaacgtggacggaagagggaggtcagccgcaggaaatgccccacgagccagccacaaagtgttagcggtctacacagcctcaatcctaattaagtactgtgtacttgttcatacagagtatctgtattgtaatatcaagtcctcagtacctcattacctcagggttcatttctccagagcctcgactctccagtccccaccaaacatatccatcccctgcccagtttctgttctcacgctcactttctttgtgtcttttcttttttgccttcggatcttagacgatagatgagtgtaaatggtatgaactagttcattaccatccacttttctgttcaccactcacattcttccatctcttggtcttatttcgttcctgcgccccgactgttccaaccttcagatggccattgaatctcatccactcattccccgatcgctattttaaaggcctaagcccctgggatcattcaggtggatcttgagaagtttgaagctgaaaccactcgtcagcttgcgccacactcgtgagaaacgccccacacgccctggtcttcgctctcttcccccccaacctcgtctgcttgaccatctttgatatatcccggtggatgaaagttagtcaagttcatttcccccaccaatattccttgcattatcctaacatggcatctaaagtagctttcgcctttgctcgtccaccctttgaggctggcgcgaaacattctttctccatggcgacgttgatgtcgaacaacgagcccatcactgtctccaactcgctatccgcaaactctattaccagctctgaacccctctctttattcaagtcttccaaacccgaaagcctgagctcgattgccagcgccggcctacacgtctcgcgatcaagagatcaacttcctccgatgacaagtccaatatcactaccggcggatcggccggagcatgagaaggacgccgaacgaaacagttcacaggtggctcgggaggctctaggtgcaagtgaaaagtcgccaggtgccccgaaccatgagcattcagtccatgcatccccggagcagatgcaaatcgactcacacgcgaccgaaccatcatcggacccatacggatcaaacgatcatcaccacaactcactaatgcatacttcgactgtagctagccctggtcctattgaggaatccgcttctcaagatggagatcgccggtcgcgtgataactccgagatcgaccacgatggcaaatcattctcatatccgatgccgacgggtaacattaacgatccgcgtcgcggactgagcctaccgaccgcaggctaccatcgaggcagtcctcgctctccgtcggcgaagaaacaccgctgcccatactgcgcgacagaatttactcgtcaacataatctcaagagccatctgctcacccacagtcaggagaagccgttcgtttgtcaaacctgccagtcacgtttccgaagattacacgatttgaagcgccacgcgaagctgcacaccggcgagcgaccacacatttgtcctaaatgtggacgtcgttttgcccgaggtgatgcgcttgctcggcacaataaaggacaggggggctgcgcaggtcgacgcgcgagtatgggcagctttgcggcagatgacgactatggcgatggtacgaatgggggaaccgacgacatggatgggttgatgtacacagcagagcctgagcgcatggacgaagaggacgagcgaagaatgaccatgccgagcattcgcaagcacgaggcagatacagtcgctcgatctgattcaattcactcgcgccagtcaaacacttacccgccaattaccgccggtcgtcccagccaccttttcccaccgccagcaaatcatggtggatcaggcgtgtcaacatcggcttcacagtctacacacatgactttcccgcctgcgggactcacctcgggctcctctatcttccctaccaatagtatcagtgatagccctaagcccctgtccccgaatgcgctctcatcgcaacatgatagtgcaccgccacatcgcgcacactctcccagcatgggacagtccttgccacacccgcagtcctctttcggacgagcaaatcaatcttcaaatcacgcaccacctacactaggattgactctgccgcagccaggcgcgccgcagctgcctccgccgccgggtatgacctccccggatgctcgatttggcatgcaagctgcaaccaaacacactccttcgcatagccactccagtacccacagtatatctcatcttaagggattcgatggggcggatgccaattccagtgacgccagccaaatcgataagctttgggcgtacgtgcgaacaatgcacgacgaattgacaggcttgcgaactgaagttgcggctttgcgggcgcacgttgcgtcgtccaactcgatgcccccggctccggtagaagtaaacttgaataactccggaccgcggtgatacgtccttgggtggttcttgtacgatatggcgtggctgaccatcagccacgtgaactggttgttttgtcctcccctccttctccactttgtccatacgccttgattatcccatcctcgtttgagggtcaaacttgatgccctcatgatcaccctgccgacagttgccggcgttggtgttttctatgccccgttattctctttcttttctttctcttctttttttccccctttacccccggagttatgtcatccgggagagcctttccgttctagcctactttattcatacctggagtgcgctgcaaagtgtgtcctttttccccctcttcctttttttttttttgagcagccgaaggagtttggcgtgtcaaacaaaaaaaaatgatctgagatcgcgatggaatggagaacattacttctcattaaactgcgaccttgatcccctctgtcctgttgtcgattccataccaaagatggaatcatgtgattgtgtttggatatgtgcatggattacgctggatttggagtttttattcgtaatgctgctattaccgatttagttagtgataatatactcttcaatcagtcagatgaatgggtacggtataattgtttataggtagatgcttccccgtgggagacggatattatcttaaacatagcaattattctcaattttcttttttcctcgacctctatcatgttacaactatatgtccttgtggaagacacggattggagactgaggcatatctgctccagggatggtggaatatatactgacttgatgccaaagtcggcaggaacaagtttgaactcgtgatcaataaaccccacttgatcttctatatatttcccttattttacctgcccgggtgccatcgagacagacatcaagaaagattaacgaaaaaccaacgatacttcgtgactatgctcctagatgaccacatctccatggatagcccaagttaagagttaaccaatatgactcccttctcctacacaatccatccatctttctcaaatacacccaagagtctccttgatctctttccttgtatcataaaatgacctctccgctgctttcacaacagataagtctcatctcaccaagactagggttagcggattcacgagagatcatcttcccatttgaccttcgcgtatccccgtccgagttctcgggtcagaccttcaagctactgatagacctttttccaacaacactagcagttgaatttgatgatagggttctaatttattgtgtccaagtactgccaccaaaaccatggccaaagcgagttgcaggtgttccgtgttatttggcaaacgacgcaaatgataaggggccagtcattcccctttgctaccgcagtcgctctcggattgatatctctcaagatctcaatctcagggatagtgatgcttcactcgacgtgatatccgatttgttacgcggctttttcgcaaaagatcaaatctcaaccactaaatcacttggccgtcatagctcttgatcaacaaattgaccaggatgaggttcttaaggaccacattctgaggtctgctccccgctctgttgctcgttgcacctgcttatatctttcagagcatcacagggatagacctcgcgcgctatctgctcaacggctgctttgtccaaagcatatcagtatgctaatcgagatggctcctgggcctcgccccataccagcattagccctgaaccatcatccctggcagaaccaatccctcctacacagaatactgcccctcctcagcaagaatgccaatggacgattctcaatacactacgttgagactaggtgtaatggtcagctccaaattccgcaggcgaatcaatgcgttcgtcctcgggcgttctcgtcaaagatcgtctgggctctaaatatatgacaactgccgctcatagatttccattcgataaaaatgtctaccatccatctctcagcggcgcaataattgggaaattcaccacagggctcactcatacagacatcacattgatgaaactcggtgatggagtagactttgtgaatgaaccgtttggaaatacgtcgacactagccagtccttttcgactcggagatttcattcgaatggcagaaacaaaacgacaggatttggtattccttgatagcccctttaccggtcttgtcgagggcaagctgatgtctaaaatatcatgcgtgttccatctgacgaccaagatcaggaaatatgggtcaaaacccaacggaactaaatggggcaagactcagctcatgagctggtggacggtgcttatggctccgccatctggaataccgatcatcgagttctgggctttctcagttatgcccctggaacaggactctacaaggatcattgcttaagtattgcattgctgctgctgatcatcttcccgatagggggtatagcatggcctagagaatttatgtctctcaattcggacaaactcaggggtcagcggccttaggatagagtaaatattccgtagactagaatataaaaacagcgatctacagccgaggcacttcaaagacctcacatctcgacaaccctcggaaaattctatccggaagcacattactctatacagttttgaaatgtctatcacactcctacaggcaccggctgcatcctttgtgttgctttccgttggacatactgtatcattgctagactcagaactcccttaaagaatcgtattgattgtttcgtagatcaagggcagacaatggacagccgatccaagattcaaagctatcgcgggcacgaatttgtggacttgtgggactctagggtggtaccaggtgcgttgaactttggccttggtgtcttgttcaatatcaaccacgctttatactgactgccttgatcggtttctatcaacaggggagcgggttttttctatcaactggtaggctcataatatcatttctcttagccaagtttttaaccatagtaataggtcttcttcactggcaatggtcacaagatccaagtctcctccaagatccactgaacaaggccatggctgggatcgtgaatatcatactctgggctagctctgcctggtatgctaagcagggtatcattgatacttccattgtccttggtatatctgctgcgttgcaggctttcagcgttggcaaggcttgcctgtgaaatcatcgagaatatatgtttgaatacttataggccgatcggatgagcttgggtgtcttacaaagagatctatcgtgcttttgcactcgtctgcttttgatttttgaggtttagtatgttgatgaatcatgatcacaatccacagctgttgaaaatttccgagatgacagtaggatgaaggtcgacaaaggcacccaacagacaaacaacaagttagccctcctccatttgagaatcctgctccaacctcgtttcttctctacgctggatagtccaccgaataaacaatcccacatcagaaacaacagcccgcggaactccacccagcatccagctccgttgaacccacttgggaatactcccaccagcctcagaagtcgtcaacatagtccaccgaaggtagcgatcagtagaagtagcgggggtattcaaatttgccgtagacgacggatccgaagaggccggagtaggaagcagcagacgctcaacccgctcgagactggcatagtaagcgaagactgcccgctggggaacgatatccatgatctgggcatacagtccctcgaattgggatcccggcatcttcggcttaggcaaatagaaaggaacctgtacagtcataaacccgtggcatgggctggattgggttgctgggtatgagctggcgaaagtcgccgacatagtccaggatatgaaggcccggggccggattagtgcgcttgggtggaaggtgtggacaataagattgactgagtttgggagttagtaggctgtccttgtgcatgagttttcgggatttttatacatacgttcgacctcgaaatgcttgtagttgatgtttccaacagtaagtggttggttgagatcccagtgtctcggctcgttccacttcagcagttgctttacgctcgtcacactgggtgtgtactccatctcgtgctcagcatggttgtatcgcagcccgtcgtggaattcccatagggaaactgtgccaggcaaacgatcggagtcttggtggtcactttggcgacatacccagaattcctttttagattttgagtcctcttggggggattgcagtgctcgccatccccgtgaaagcttcacctttgcctttgagggtggagaagagcgcagcttgcagtctggtttcagcgtcgatggaaactggtttaggagaggctgagcttcaactaggatggcgtgaataaactcccgcagatctggggtgttggcatccccttgaagatctgggtgacgagggaggctagtgaacagatgtggctctagttggattatcggcatgataggggatgaagggaagaaggcttggcgatgaagtagatgtacagatgtacagatggagaaaggtagtgaaaagaagaagtgagaaaggaaatcaaattttaatacaattaggtctttcttatttgtttgcgcagttcaagattatgtgagaatagaaggtcgcttgtttagtcgctggtttagtcgcttgtttagacgatcccaggaacacaactatattctcgtgaagacctgatcaatcatctgtcaagtgaatcttattgatcaaattaaaacttgggcaacaatttatataaatattatagagactatagacagcggatcccaggtccaacgctgccagtctcgaacatctccacaagtcccgcgcctagtgcttcctctagcgcccatcgaaagcgcatcccatatagctctttccatttcttagtcctacccggcaagacccctgcaaactcgccacgggctcgcttggccaagtgaaagctcttgtcggtttcaacagctccatcccatcgatctttcaacagacccagaggggcttcgccagaagcggaccgccggagaagagcgagcagatgtgcacgacctgaccctaacaagcggagatatgttcccgtgttaggaagagacaagaacagagttgccgcacgagcctgcgcatttgactgcacagggcgctcggagtgcgagatagactcgcttcgactggctgacgaagtcgccatttgaggtagattaggaagtgatgcaatacttaatgtgccctgtgtgtaagatgaggacgagacaataaagccggcacgtagtagcgccctgtactcatccgttgtgaagaccccctgcgatatcgccgaggatgttccaatccgtttcagtatatcaaggaatttctctgcaaacttgtcagttggcgacgtccaaagaatcccaactccaaaactcacccttcactggttgttccaatgcagggctttcctgcaccagcttgtcccaatcctctgctagcaccaaacaatcgcccagccctgccgcgtcgttgcctcgacccggtataatgagtcgccgaatccgaccagcctgaatttgttcgacgatttccctctccacctgtgtcggtgcctctagaagggtatggacatgtgccacagaggcgaggggaggcaaagatcggcgtagattgaggacttctgcgatacgcgtgctgttcattcctgcccgtgccggaagttcttcgaacatgccatcacggatatattgaatagcctgcagcacattctgaaccggtgcagtctccgctatgaaatgagacccgcctacatctggaagcgggtcatcgaaacctagatctgcagtcggttttaggctgcctccgccatatgtaggttttcggcgcgcaagggcggcaaagggcgaggcgcggggtttgggagcagaggatttgcgtttcttgacaccagataccggagcggaggtaagacgtaaggtcatggcatgggtgtgtgaacctttcactatgcataacggattcggagagaaatattgccttatgtcaggtgacagctagatattccgccaatcacagccgatctgccatagttctgtaatcaaataccaaaaataccgtacgggaacacccagaccctcaagtggggtaaaagcggtatgtcacagcaagggaatggataagttgttgtcttccctcggttccgcgatatccttttggcttcaaaggacttttaagtgatattcatcgtcatctctgattctagccctcgggcatctagatttgcctgtttcttcttatttgtcctagcaaatccacagggcaaacttgcttctccatcacttggcactttcacatgacgtagtcatgagaaacgcatcgtgtaactaacatttctttttcttcagcccccggtttttaggactctaacccctcgtttgatggccgcacctatccattgctattgtcaagaaggtctatctcatattgctttttgatattattttgcctatccgcttaggctcggctcaatcaccatgacggtcttcatagcatctctgtatgtggctattactggacctggaactatatatggctaaccggcgaatttcttatatagatttttgccctacactatcgatttccacatcaacaattcgcgcgcccgctctccccctctaagtcctccaagtcctccgtccgtgaaccccactattgaggggatcacacccatccccaattctaccgctagcctgtttgagaagaaccttccagggcaaacaccgggtcttacaccaggagctacaacggatcatgagcgcatatttgctgcccaggtaggcaagacagagcacgagacaaacgggtacccgttccctttggccgtcgagcaggataaccggctcctcacacggagtgagggtcattccccggtatggggtgccacaacctcgctcaatcaaccaaagccggcggcggtcatgtcgccgtctccatccattctcaagcaccaagatcctcgccccgccaaggaacctacgcaccggcctcctgcagttgagaccattgcttcctatgcaagactaagaaaggccagcacagcgagccgaaaattatcattttcgaaagctgaatggaccatcgagaccgcggagcagggcaatggtggcctgcgtaatgcagtgcgatccgcaacagacgccggaggcttggatagcatgatgtgggtgggcaccttgggtatgcccactgacgcgttggcaaagcacacccggcgcgacatcgcggagaaattggaagatgagtacgggtctttgacggtttttgtaaatgacagcgactttgatgggcactacacgcattactgcaagaccattctttggccggtgttccattatcagatcccagataacccgaagagcaaagcttacgaggaccattcgtggatctattatgtcaagttgaatcaggcttttgcagatcgcattgctaagcattggaagcggggtgatgcgatctgggttcaggattatcatctgttactggttccagctatgctgcgcaaattggtgccagatgcacaaatcgggtttttcctgcatattgctttcccctcgtcggaggtcttcaagtgcttggcgcaacgcaaggagctcctccagggcatgcttggtgccaaccttattggcttccagacagatgaatactgccggcacttcttgcagacatgcagtcggattttgtgtgtggaagcaacacccgaaggaatccagttggaagacggttttgtcaacgtcggcacgttccctatcggcattgacccaacttcttgggataagcgccgccgggcaacggatgtggagcgatgggtccatgcaatctcggagcgctatcaaggaaagcgtctcatcgtctcgcgcgataagattgattctgttcggggtattcgccaaaaacttcttagctatgagcttttcctcaatacctacccagaatgggctgataaagttgtgctgattcaagtcgccaccagcaccacggaacaaccagagctggaagcgactatctctgatattgccatgcggatcaactccacacactcaaccctcgctcatcaacccttggtattcctcaaacaagacttggccttcccgcagtaccttgctctcatcactgtggcagatgccctgatgatcaccagtctacgcgagggaatgaatttgactagccatgagtttgtctactgccaagatggtcgatggggcaacaaagcctacgggtcattaattcttagcgagttcactggcagcgcatctgtttttggaaatcgtgctcttttggtcaacccttgggattaccgccagtgctgcgaagcaattcacacagcactgactcgcgatgagaaggaacggaaagaggtttgggaggaaatgtaccgtgcggtcctgaagaactcgactgccaattgggtgaaatcgttcaatgaaacgctcacccgtgtatggaacgaacagtcttcgcgagaaatcatggcagtacctcgactgtccgtatccaggctgaccgagcgatatcgccagtccaagcaacggctcatgatcatcgattacgaagacacgctcgcctcttggggatcaccacgcagcatcattctgaccacgccgcagcgcgcaatcacaactctaaatgaattgaccgaagaccccgctaacgttgtctacgtaatgagtgcgcgtatgccagaggaaatggaacggctgttccggcaagtcaacaatctgggacgaattgccgaaaacgggtccttcgtgcgcgagccgaacgccgattcgtggacccagcttgcagacaagaagcatgtcaaatcatggaaggcatccgtgtctaatatcctggcatacttccacgctcgcgtcgagggtagctggatcgaggagcgccattgctctctagtcttccaccatggatccgccgaagaccgccaagctgcggctcgatctgccgctgaatgcgcaggcaacatcaacgatgcgtgcgctaacctgggtgtgcatgcgattcccgttgagggtgctttgatcgtggagaccactcacaccaacaaggcatctgcggccgcacatgcctggaagtggtatatggcaaatgccgacaaaaagaaggatttcatcaaacctgacttcttgctggttatcggcgataatcgcgaggacgagccggtcttccggtgggctaataaactgcacagcacaaaggccgtcgactatgctatgactgtcacattgggctcgcgcagcactgaggccaaggcaaccttgacacagggagttactggtaagtctggatttattctatttttatttcggttgactaattttttacaggcgttctttcctgtctgcaacaattggcagcacaacaggccccgaccaaactgccattgcgagagtgaggaatttgattgacttcggatttccaggacatgaacatgcgaagacgaatacacgaagatagcaaaacggaccggagttctcattttctttagcaactatgatttggtgctagcatactattgcggcgcattttggatcaagttgagacagtacatacatggatatggaggctctacaggaagacatatttgcattgcatcttctaataatttcgggttaaagtttagaaaagaagaaaaaaaatatgattggaacaacagggaactttcctggtggtttcttgcgaacagttaaagctcagtcatttggttagtcctcttaagacattttataattttatatgaagcatctatggatgtcaaccaagcgaggtatgattgtttctggcccccgactgggttggataggataacaagccagaatcaatcccacctcttccctattttcagccttcactgtcatcaaacttcaagaattccgaggtggtcatgtactgctaggaccaaataggcaggtaccccccaaatacaggtaggactttcctattttagcgtttgtgagaaatacgagttcaggatatgcaacttttccagagaccaaaaaagtattatgtttactccaatcaaaagctatggtttatcgttaaccagcaccgcggcacctacacagcggccgggataccagacggcaaagagaagagccactaacgcaataggcgcgaattcaaggcatgcgaaatagacctcattggtttgcagctctcccatgagaccctgggcggtttccgcaagacggaagatagttctcaaatagatcatgagggtcgaaattgaaaaagccaagcagaagagcccaagcccattcgctctgatagcaagtcgagctcggaactggaaactcgccgccacgataacaaagatagtcatgacaaagacctggtatgcgaggccgcccaggaggatattgttcgccgttgtgggatcttcccggcgcgactctgtaacgccaatgagacacgcaccggcgatctggacgattgttgagatgacatccgaagtaatgaagaaggctaggatgacccttggaggtaagaatgagtactggctccctactcgtgggatcagtgccgatagaatcgtgtagacgccagcggcaagcaatacaggtgccacaacgataaaaaagtagttgaggatgaagtagatgaggtgatagggatccttcttagcggagagggatcgtgcaatgtaccctacaacctcgaaaaccagaccggcggaaaaggtcatccaccaccagctgcggttcttgatagattgagtcgtgtggtagacgaagtgaagaaaaaaccacgcggctgcgaaggcagctagggcaatggaaggagtgtagccatagatgatcacgggggtgtcattttcgccgcccggatttggaaagtaggggtcaacatagccatatgagcgtgctatttttccattagtgatctgaaacgatggccctggagagctgcgttcaagtgcggtgcctgtgatgtagtggaccatcttttcagccctcggattcgccgcacaacagggtcagatcttctctatgtagtaccgatgaacacgctaagaaaggaatttgcctcattttgtagtctggttattgaagggagatttagcacaggcccctttacgcgagctgccaagcgtaatgtcgcatagcccaatccagaatatctcgattgtttcccgatcgggcctatcgcaaggtctcatctataccagaggacctgctaaatttgatcccttgttgttcgcacagccctcttacgtcggccacaaatttatgccattatatatctcttgacttcaatgtctgtgaaactttggaaaaacccacgtgtcaaggcttatgagtagctgactcagcttctcggctgtccatagtctggggaataagccgaggttcgccgatgtcgtatctgtggggaagaggttcaatatcagatcatataaatcacattccttagacctttagaccctcccatctaacccccgtacatatcaaacactactgcagttatgtccactatcaacccatcctttcaggaagccatcaaggtcaccccgcaaggccacaacaaatacagcgccttcctccggccagaatggtgcattggaaccggtatagtagaacccacgtaaacaatcctctcccattgacccaagctaacaccccgccagtcccacacggcggctacacaacggccgtaatctaccaactagcgctaacgcacttcgcgcacgcccacccaacgcaatacaaaagcgccgcgtcgccaatctcaatccaactctccttcctgcggcgcacagcctcaggctccgcaaccttcgaagttgaagacgtcaagatcggcgcgcgcaccagcacaatccacataaagctactacagccctcggagaaaaagcccggccagctggacaccatggtcgccggctatatcactgtcagtccgccggaggccgaggtcggaattagcgcgagcacagggtggaaaccgtaccctgctccggtggcaggctcgcgggcggacgggtccgttgatctagcagcgctgggccgcacaggcactgacggcgtttggacgaagctcgagacgcctttttcggatttccgtaaggctgcggcgcagatcgagctgtttgggcctggtgctggcgcgacgcaacagaagcgctcggggaatatgggtattgatcagtgggcgaggttccggcctgggggtgatgtgaatggccgctggacggaggctgcggtggcatatctgattgatatgtttcctatggtgttggatggatttgatactatgtctgctactgctgtggctgaggagagtgggacttcggttgatgaagagaaagcgaagttttggtatcccactgttacgctcaatgtggatatgaagaagcatcttcctgctgagggggtagagtggctttatagtcgggttgttactaaagttgttagggatgggcggacagatatagatgttacggttcttgatgaggacggagaggttattgcgctaagttcgcaagttgggttggttgttagtgctagtcggaaccttgggactaggaagatggagaagttgtagatagtcgttttaccgatatatatatacatgttttgagaatagattttatgtgttcaacgcaggcttagtttatgtctatctatatatgatctatctgttcacttctgtatgtgcaaatcgggttttatgtacgggatcgacatccccgcatgtacatcagggaagtcgatcccctagtctgtgcttcaagcttcgagcctggaaagaaaaggacgctcacaacttcgagtcagaggtcacaatccaaaatgccatggcatccgccttgacgacctttctcttggtccactccaaatgtcctccagtctcctcctcatcctcctgcaacgcctgcgcccggacccagaatttcttgccgagcctcccaacaactcgcgctttgataaccagcaaagcaggcgtagtcacccgcttcttatacctgacatccagttgtgcggtaaagattttcccgcgcgggttatcctcagccataccgggcgtagtgggcgcattggtatgcgccgcgacagcgagggacatggcctcgtcaatcagcgtcgcgacaatgccgccgtgcgcagtggatgggtggccagacacaccggggctgctaaggtcgaagatcataatgatgtccgcagggttcaggcccggggtgggcttcgcgacagatgccgcatcttgttttgttgcggggagccaggtgggggcttcggcgggcgcgggtgtgagattgcgccgttgcagggttagacagtgggggattgtggtaggtgtgttgagggtttgtgcgaagtagccatcttcaccagttgtaggctttgggcgtcgtgagtcagtttggattggtgtatattcggcagaggaaatgagattatttgcccatgagttggagcggaggtgcgcgatggcgggggccgggtcagccatttcttctttcttctttttttttcgctggtattttggtctcggggattatactgcaattgtcatagttgaggtgcagctaaaggacctggcatgaagtgtttcagcggtttcagcagtatgttagggcgccaacggtgtcacgacataaattgacctcggctccggctatgaccgatcgggacatgataaacagtcacgtggatatatattggatcaaatcacccagggtccaatggatttgcaaaattgatttgcggtggagcgaacatcaaaagcttcgaagtacatagatatctgtatgtattccctttccttgaattgaagaaccaatcatgccagtctcgagcacagacaatgcattgtctcacccccggcatgtaaccggtagttgaccgtaagggacccgatgggggaatctgggaatccggacaagaatgcgaggataaacatagtcccaacctaagcgacttatctcaggtcctgtatcactttagcgcctgctagtgcactcagcaatctccgaacagaccgttatgattcgtacggattctagcggcaggggcaacttagcctgactgggtttagtagcacagccaaggaccctttcatttgggtatcatttttccatagacccttttgggccagctagctatcaaaacagggaaaacgggggaaacagggcccctgtgcaaggcgaatattcctattttctccaacgaagatagaaatatgaaaacaatagcacgagttcactatccaccgtggcatgccaattataggggtcagggccgaacctgccaagggaagttctttcgaaaaaaataaaaataaacgtgaaataccttggataccttggaataccctggatacaaagcacctgcccattcttgtttttccctcctcaaaccctcctctcttctctcttctctcttctcttctccttgtacacagcatctctaatttatccatcatgcgttcctcaattatcttcctttcagctctggctactgctgtcatggctgacaattccactgacacttacaccttccccgctggcttcaatattggtctggtggatagcggcaccctgagtatgtaccccgaccaattctgacacgacgaagcgctaatgaagtaggctcctggtgctctgctcagcgcaacacctgccccgatctttgctcaagtggtaccaagctgaactcttgcgacccggtatgttgttgtgtatcgcgtccatacgaccgggagattaacgctttgaacagaccaccctgaagttcagctgtgtctgcagcgatggttcaaccccaaatgtgacctcctacattcagaccgttcctttctacgtctgccaggctacttacggccagtgcatcaactcgcaccccaacgatgctgagggccagcgcgcctgcaagcaggcatcggccgactgtggctccaagaacgcaagtgcggtgaccaccacctcttctgctgctgcgacttcggccagcgctacgagcactctggcattggccactacgaccgattcttccaccactgccacttcctccgtcgctgctgccagcactaccaccaacgctgctgtggccctcggtgatctgacccagtactccactggtctgatggctggtctcatgttcgttgctgcgcgcatgatcctgtaaagggacgatgttcttcggtctttgggcagttaattaccacttgatggttaggtcgcatagcgtcctctttgttgtattcccttaactcatcgcgttgccatttgctttttttccttcgagacattcgattcccctctgaataggcttgacacattacgatcgtccgcatgtttatgaacgcggcgcctgtcctttcttgttttgctttgggtcggagttcattttttgtctgcgccggtgccgatttcgcgcattaactattcgattcaaagtaatatcaccaattatttccaacccattgggcagcagaatgagagtagtgacgattgcagtgtaaatatttgttatttcacctacataaaatattccaaatcaagtaaaagagtcaaaaggcacacatcagtcgagatgttttgtggtgttcctctcgccaagactttttctggcacacactgaaatttctcaacttatcgatagactccaccatcaagaacttcacgttcgctcttcctctccctttcccacatcaaacatcatgcccgcccctaccaacaccctcctcattgagggttccttcaccgagctcgccgacgagtttgcccagtacatcgatgccctccgcaaagagggtagcctccagtccgagatcgccccgctcctcgaacctctccgccagcaggaacagtctgaaggcgaggccgaccttaagcagcgtgatgaagtcctgaagaagctcgtgtcgtctgcgaccgctctgaacagtgcccccgagaagggtaagtggacaaaaagtgtcaaagaatgatctgcagacagagtcgggaatttggcacttggatctttgatggacaaaaactgacatagattgacataaatgcagagatcacctccgcctacaacctcctgatccacctcgttcaccagtcttccgacaccgacgtgttccttcctcgcatctgcgcctatctcgctaagcccatcaccacctcccctcagttcggccctacgctcgccatctccattctcaccaccatcttcaacactctgtctgccaacgacgcgagccggtaccacgttctcctcgctattgtggccgtgatccgccagtctggatctggaattgccttcgaagccctcaagcctcagctcacttcccagcttcccacatggctctcagcgtgggggttggataacgatgacacccggaagttgcacatcgccattgccgaggcctctaccgctgccggcgatgaggatctggcccagacccacatcgtgcaagcgcttgagaccatcgacccttccgacgccagcaagcccgaagcccgcgaattggctgtgcgcgctctcgctaccgctctgcgtcgctctaccgtcttcgacttcactcccttgaccgcctcagacgccgtgcaggccctgcgctccagcgacagcactctcttcgagttgctcgagatcttcacctcggacaccctcgatgcctacgagaccttcatcgctgccactccgctcgcttccatctctggcggcgtgctcgccgagtccgccgatgccctgcagaccaagatgcgtctcctcactctcacctctctggcatcctccaccctttcgcgctcgcttccctacgccactatcgcctctgctctacgcgttcccgcctccgatgtcgagatgtgggtcatcgacaccattcgtgccggcctcgtcgagggcagactgtcccagctgaagtccgagttccttgtgcaccgtgccacctaccgcgtcttcggcgagaagcagtggtccgaggtccaaggccgcctgatggtctggcgccgttccctcgagagcgttctgaacgtgatccgcaccgagcgtgagcgtttcgcccgcgagggtatccaggccgcggctgaccaagaagccaacgccaatcgcaacggtaacggtgaccgccgacgcattcaactctcgcagccgacgcgtgaggttgaggctagtgccgaatagttgtgtccttttttataaatggaaaagttcacaaaacacaaaaatctttcagttaatagaggggaaatcttgctgtcttttcctcatgcatttcttttccctggccagttgtagggttgggtttttactgcccccgttggatgtttgggaccccacgagtcatgtcatgtcaatcttagtcttgttttatgttttccggagggatgactttccgtttgttcatttttttctattccggcttaaagaatattatatttctttagactggtcatggttcatatccgtagtcaactgacaacttcattggcttcaggttcaagtctaaaaatgctttctatactctatattcaagccgagcagagaaatcacacaactcttccccctaaagggacaccaacactatatacatcgatacaaacacaagaatcccgcttagcgagtgtgcaaaccacgagcctcaataccggccttgacctgctcatagacctgctcaacagagctatcagccttgaccgaaacaaccttattcttcttctcgaaatcatcaacgacaggcatagaagtctcgacgaaagtatggaagcgcttgcgaatagaagccgcgttatcatcatcacggccactagtctcaccacgcttcagcaatctagcctccatgacatcctcagggcaatcaaggaacaacacaagctcggaggggcaaacagtctcctcgaagaaaacagcctggtcaagcttgcgtgggaacccgtcgaccaagaagcgggccttggtgccagccggaggcggcgaggtcgccagcgagtcggccatggcattcgacagtaacgcaacggtgacttgcatcggcacgatcttgccttcgcggatgtactcgcgaatcaggtcgccgtactggctgccttcgcggacttgctcggcgcgcaggaggtcgccggcggacaggtgcacgaagccgtagtctttgacgaggttggcggattgtgtgcccttcccgctgcctgggccgccgaggaagaagacgactgttacgtcgtttgtggagaagcggggggtggccattgtgggtggttggtgcttgtttagttgggagggggggttgaaggagatagggatgaagttaaagggggtttaggactggggttcgagtcgaggttgcttgtggggtgattgtgtcggtgtggcttgactggaaacggacgttagttggctttttccttaaatgtacgctaggccttccggacttacttcaagctagtttggacgtgaggtgcggacgccggtgcgggacttgacgaggtagacgtaggcgccggagctgatggcggttatgatgatgatggggatgattgggaaattggagcggctggattgaggggcggagggtgcgcgtggcggcgaagatctcggaggattcgagtacaggcggtggggtacctgagtcgatcgggtgaatttctggctggtaaggacgagaggcttggagcggactccggagaattgacgggctagagagaacatagagaaagagggaggcttgtggttgttgaggaggtaaaatcaaaaaggagttgggatcgccgaaacgggattagctgatctgtatacctcgatgcggtacgcttcggcttcatggatctgggcagtgatattaggtaatacataatgatgacaactgtttatattcatacatgccaatagattactagatcagtgagctcctcctatatacaagtatatgtcgtacaatggaggaacaaggtgagttgaaattaggtctagaacagtatgaaactcggatccgatccatcaccttagtacttacatagtacggagtagttagttacatatgtgacaccaaggttcagcttttgcatagaacaataacctggtactcatagttcggggctgttcgctattgttaccctaggtagagggtatgtcttgagacaaaatgctctctgtccacgtagtcccaacttttagtaccaccctttttttagcatccggggtagtatcccttcgtttaagatatcttaaacctgtgcagtcttagcggtatactatagttatgattgggttacggacgagcggctgtgccaacccaggtctaagaaacatgccgagatatattttcaggactcaccgcgtatgtacgtctgcactttagtagttaacattgaaagggggattcaccaatgctagagataaattctgacctgtcaatctcatattatcaagtggtttctataaacttgattggtggaatttgacgtcggctagtacgtatattgtggaatcctttgaagtttcgagctacacactaagaatgccggtaatagcataattcggaaagcagccaagtccgcaggaagattttcaacagctataagcgacatatctttctcttctacctcctattattggcagtgtccattattgagcggacatcatccctaatcaatcgtggccagacggtgtttgatgaagtccacaacgtcctgattgtatttccatatgtagccgtggtgtgcggcatttccgtcttcggggtatggtgagcagcattgttcatcaccgtaatcacaatagctgtgcattgagctagtaaatggtccacataaggctgggtttagccgaggaagaagctggtacatctgctttagattataattcagcacttgaatatgagttggtactcacgcctatacccagtgtgcaattgcccacattccacggcataccaggaaagtatgtctcatcaccatacgcaatcgcagctatgactagatatctgatcagactcgtgttttctgacagcctcgacatgacgtactagtcgagttgtaggtccgcgcaagaggggcgacgaagaggactccaacctcactggttccgcacagagaatccatcatgataactgctccctatgtggtagtgagccttggcattttgcatgtttgattgccataatacgatgtcaccattgaatatccaactaccacgatcttagtttgggggcagctttcactgtactcctgcacaaactgctgcatcagaagcgtaccgtcgtgaacagtatataatttgtccaaattagttaagacgtttccatgatcgtagggtaagccgagggttgtcgagccggggatctgcttcaggatcaggtctgaaagagtgctcattacattcagatcatcgcccccgccttgccccctagcgataatagcatgaacgcccgttgcacatttatcctctgacacagactgtgcgtgagtctgtatcaacatcagggtgacagctgacagtacccaaacgatctgtaggatcatattgtacatgttggagaatttgaagccacactcgagatccgacgtcactgatgatatgttgaagaatacgccaccatttgaacttctttgcttgtttttccttccttatgacttcggtgttgaatgaggaaatgcccgaatttgttgaccgttgctttattaaccctccgagcctacgtagtaccgatacatcagagggttttctaggccgcggtctgatgtgttttttatatgtgattggtgttatgttaaattctaattgtaggtgataagatgaaaaccttttctcgtacatattcgagaatgatacggaatgtcgaagtgtctatccatatccattttgaaagtacgatctacagccttggccttccatatctcagcttaattgcagtgcaggctttgcgtctcaccttggctagatattagagctcggatttgacctggagcgcaatcagtcagagttcccggtagtacacccgacgaaccataccggtgctttgggagagtaaaattctagttggaaagtctccaattgcgacaatacatgttttggagagaatattatcgcttgggaaagctggtgggtagcacatcatcctaattaggccatactcggcttaggctctactccatcaagagggcaagaggcaacgctagataacacttgagtgaataactatataggatgcattactatatatatcaagttcaaatcaaactatcttgcagaatatggcctttcagaatctggaacgcctcgagcccgagtttgtgtattcttcaacgggtcttttgctgtcataccgcgcacagaaaggcttcgtgcttcccatgaaccacaggcctcaattatacttgatatgctctgtcgattaggtctcgcacagcatttcccaactctgtgatgatcggaccagaccgaggaatggtgtggccccgtccagtgtcaaacatcgctgcggtatcaggatcacaaatattgaacaaggccaatgcgccgtatcggtaggggtctgtgccgaagataaacagtgagtatatagtttgaaaggggcaatagacgtcaaaattaccatctgcaccaaccacgtgaagcgtcggaatgtccagagtatagtcgctttcatctgccaggaccacgtcttcctcaggggaaagaggaggccagccggtgatgaaaatcgcgcatctgatgtgacgaggacgaccagtctcctgagcctttctatcctcatccaggattagacttgcagccatcgtagcaccctcactatatccgatgatgccgtcgatatcgggattcttctccagtgtatcatagaggtattccatgacttgatggtggtttatccaacggccatcccaaccgttacccaaagctcgcatcacatcttcgggacacgaaccatgcggagattttcgaacgcgagagatcattgagttctctgctactcctccatcctccaaccaccggtaatgcggcccgataccgaaatactccgtgaaccctaggaaaatatgataatcagaactgctttatcagtgtctaagcccaggaggacagtacctgctggtggagacacaagaacaggaccgttgatatagtggaacgaagcgaaaccatccgtggccatctgcttcactaggggatctgcaatattgtcagctggcccttcgagtcctcaaatgtgaatgatattaccaagctgaatattaatattctgtgataagcaagtcagtatggatttccattatggtgtctctgatcacctacgtcgatgttaccaatggcgccatgaagacataagaacctcatcttgtatcagtctgtaatgatctatgggaacgaaaagtaaaatatgggagaggtaacgagcaattatagaaaatatagaaatcaacatatactaggaaataaattaccgctcgggctgtacaagtcgtgtaaagcaaatggaagattgggaaagcacgggatttccgccgagcatcaacttcccaactacaaacaattgggatatcgaataatgtgggacggtacaacatttcagtcaaagtcaccaattcgggaataaccaccgatcacccaatgctagcagagcatcgatcgccttcggagtagagacagctccatgaagctgtacacccccaaaatgacccgtatcagaagagctggtgggtatttgcaaggctatataacacgccataacaacctaggcagtcggtttccccgatttccccgatttccccgatgtcgatgtggctccccaaaattatatagactcgcgtcacagttgcaccttctgcacttttcaccatgacaaacatgaagggtgctgattcggaaggtgcgtcctatggcgaccagggtaccctccaacctatcgccatcatcgggtattcctgccggctgccggggcaagttacatctcctagtgagctatgggagctatgtacccgagctcgaagtggctggtcacccatccccaaagaccgtttttctgtcgaagcattccatcatcccaattcatccaagattggttccttcaacccaaagggaggctacttccttgacgaggacattgcacagttcgatgctcctttcttcaacctcaccgtgcaggaagctacggccatggaccctcagcagcgcttgttactggagtgcgcgtatgaagctctggagagcgctggcatccccaaagagaattttgctcgccggaacgtgagcgtctttgcgggtggtaatttcgctgattatgagctcaataatgaccgtgataccgagactatccctatgcaccaagctacaggctgtgcggcctcgctgcaatccaaccgtatttcatacttcttcgatctacgaggacccagtgtcacagtggatacagcttgttcttcctcacttgttgctctccactatgcagtacagagcttgcgaagcggggaatccaaggaagcactcgttgctggttgtcaccttaacatcgtaccagatatttgggtttcgatgtccatgtcacagtatgtatttgcgtgtcctccaagccaagttggagatcatatgacctgactgtctggaatcatataggttgtttaatgatgagggtaaaaccttctccttcgacgagagagccacatccggttttgcgcgaggcgagggctctggtgtcgtgattttgaaacccctcgacgccgccttgcgtgacaaagatcccgtacgagctgtcgttgtacattcaggagtcaaccaggatggacgaacacagggaatcacattgccgaatggccaggcccaggaagagctaatccggcaggtctacaaagaggccaacatcaacccggacgaatgcggttttgtggagatgcatggaactggaacaaaggccggtgatcctatcgaagctgcagcagtccatgcagcacttggaaagaatcggactccaagaaacccactttacattggatcagtcaaatccaacattgggcatttggagggagccagtggtataattgccatcatcaaagcagccatgatgcttgatagagagctaatgcttccaaacgccgagttcaagaaagcgaatcctaatattcctatgagcgactggaatatgaaagttttaacgatgacgcggccatggcctcctcgcaagaaatatctcagcgtgtccaattacgggtttggaggaaccaatgcacatgccgtacttgaaaaagcaccactgtcatcaaaagccccagaccgagctgttgaggatgttgaagtggaccccaaacgcaagctgttcttgatctctgccaacgacaaggagtcactacgcactagaatcaaagacttcggtatctacttcgaacagcatcccgaggtttttgaaaagactctgttcggcaactttgcttataccctaggcaacaagatgtctcaactctcataccgtgttggcgtgtcagctacctcgctagatgaacttggtatccgtctcgcccaattgaatatcaacccctctagggttctgggagccccaataatttcgtttgtcttcactggtcaaggggctcaatgggcgcagatgggtgttcctcttatgcatgaatatcctgtctacgagttggccatcaaacgagcagatcaatgcctacgagatctcggcgccgagttctcccttgtcgaagagttggaaaaggacgcaaccgcttccgacattgactcccctcatctaagtcaaccagcgtgcacagcgcttcaaattgcactagtcaacctcctagaatcatggggaatccggcctggttcagtcgttggccacagttctggagaaatcagtgcagcctacgctgcggggatttatgacttagagggagctatggctctggcttactggcgtgggcaaatgacctcgttgcttaagtcctcgttcccgtcccttaaggggactatgattgctattggcacgagccgcgaaactattcagcctatactaaagaacctctctggatatgctaccgttgcttgcgtgaacagtcctaccagcgtgaccgtgtcaggagacatatccacgattagtgaactcgaaaaggttgtcgataataaacaacttttcaaccgaaaattgaagattgacgttgcctatcattccgaccacatgaagaaggtttccaaggcctacttagctgcgattgagaacattaggcacttctcgtcggcgataaccccattcttctcttctgtctttgggcgcttcgcggaaccctttgaacttggtccagaatactggattgcgaacctgacatcaccggttttattctctgatgctcttggcaagatagtggcggacgatgaaacacgacccagccttcttattgaaatcggtccacactccacaatgaaaggccccatcatggatactctaaagagcttgggtcccactgtctccaagattgcatatacaccaactattcttcgtaaagtgaatgcagctgagtccatcttagataccgctgctgctgcctacgtgcgaggcgctacgctcaatatgacagcagtgaactttcccaagaccggagcggcaaaccggtggttcttgagtaacttgcctcgctacccttggcaacatggaactcggtactggcacgttgcccgtattccacagaagcatatggtcagagatggtgctaggaacgatgtcttgggagtattggcaaattactcaaatgatctggagccaacgtggcggaacatcatccggttagatgaggttccctacctccgggaccacaagatgcaagggatggtcgtttaccccttagcaggctatgtaggtttaatggatgatccgcatatctaaataatgctgactgactgtccaatagttggtgatggccattgaggctgctcgacgacgcgcgaagcaagctgatattcaaatctcccagtttgaactcagggaggtcattgtgggctcagcgtttgtgcttagtgatgagacagatgcagagaccaccattactcttcgcccctacgctgagggtactcgtggatcatccgatctttgggatgagttccgtgtctgctcatggacttcaaagcgaggatggacagagcactgtactggacaggtacgggttcgctccgatccgaaacagcaggcagttgtgatctcgagtccgttcgagactcaagccacttacatgaaagctcaaatttcccgaattcagaaaccggctactaattacctcgatatgtcccacatgtaccaggttcttggtgatctaggagccgggtatggtcctatcttccagaatattgataactgctactccagccctcaccactcgtttggcgatctatacgttagaaatacccgcagtgtcatgccgaagggatttgagactcccttaactgtccacccgtcattcctcgatggactgctacattttgcttggccccttcttggccagggcttgggccgaatggatctggacacactttacatgcctacagtaatcaagcgtatgacagtcggtctcaatgtaccaaccaccgctggtgaatacctcaaaggttactgtagtggcagtcccagcttgccttcccctgaaccgaccaaatttgacctttttgccacccaggagggctctactgaacctattattacaatagatggcctggtaatgactcccctcagagattcagacactaaccgtgaagagactcgcaaattgtgctataagattagttggcatcctttggccgaggctgaaaacgccgttgaagaagatattcaagatcgcaacggccccgccgaatctcacggcgatacttatatccacggagacacaaatacgaatgggaatacaaagcaccaaggcaatgcgcacacaaatgagaatcccgtcaagcctaagcacgatctatgcattacgtactttggtaaatccgatggtattgctgataaattgagtattgccctgtccgacgaatccgggtggcaggtttccgtccggaactttggtgaagtgaacttctctcaaaagcaccttgttctacttcagactggagctagctctctgcgatacctcaccgaggatgtattcgaggggctcaagaaggcactactcaatgctagaactgtgctctgggtctatcggactgattctcccgatgctcaaatgacagtcggcttgactcgtaccttgcgctccgagacctcggctagaatagccactcttgggttggttcctgacatcaaatatcccgagaagcctatccaggcagctatcagtgctctatggcccaccgatggaactcagcccacgaaagatctcgagttcaaggccaagggctcggagctatttgtccaacgcatagtggaagatgattctgccaatagtttcatccacaatgagacccacgacatgacaatctcaacccaaccgttcagtcagcctgggcgccgcttcaagatccagatcggcagtcaaggctcccttgattccctctactttgtagacgacaatcccctaccattaggcgatggccaaattgagcttcaagttaaagcaaacggtcttaacttcaaagacattgtggtctctatgggccatcttgcacagccttatattggaattgaatgcagtggtgttgtctccagtgtaggttcaaatgtgaagaatttcaaggtcggtcaaagagtaatggccatgccagagggctgtttctcgacttatgcacgatgcgctgcgactagcgcgacagaaatcccagccgacatgtcattcgaggttgcagccaccgtgccagttgtattctgcactgcatactactctctgtttgacctaggtcatctccaagccggcgagcgggttttaatccacgccggtgctggaggtgtcggtcaagctgccataatgctagcacagatgatcggtgcagacatctttacaacaatcggaagcctcgacaagaaacagttcttaatggcccagtacggtattcccgaagaccgcatcttttatagtcgtgatacatctttcgctcgcagcatccgcagagccaccggcgatgttggtgtggatgtcatcgtcaactccctggcaggcgaacttttgcgcgagacttgggagtgtcttgcacctttcggaaggtttgtcgagatcggcaaggctgatatcacgaagaatactcgccttgacatgcagccctttgagcacaacgtcatattctcgtcggttgatctcaccaaggttggcaagtccaagcctcagctgatgaagcgcatcctgggtgatatatgtcggttgattggtgacgggtcggtgcatcccgtcctaccactttcgatttatcgaatttccgatatcgagaaggcattccgtactctacagatcggcaagagtatgggtaagattgtggtggctcctcatgaaggtgaccaagtcaaggtaaacaaagcacatccgcgattaaatttcagatctaatcgttcatttttcaggctgtggctcccaagaccagtgccactctcttacgacccgatgcatcctacatcttgattggtggtactggtggtctaggccgaagcatggccaagtggatgtcctcgaaaggtgcaaagaacattgttcttgtgtctcgtcaagccgcgattaatgagacggttcgaactttgatagatactttggctcctctaggagtgcgaattatcgtcaaggcttgcgatgtcagcagccgtgagtctgtcaaggctctgattaacgaagagatgaaagaccttcccccaatacgtggtgttattcacggtgcgatggtgcttcgtgtaagattttactatgatgacttatttacattatctgttttcattactgaccctacttaggatatgctcttcgaaaatatgtctcttgaagacttctctgccgtagcgtgcaacaaggtagaaggagcttggaatctgcatcacgcgctgatcaattccccactggatttcttcattgccctctcatcgatagccggcatcatcggcaatcgcggacaggcagcatattccgcagcaaatgcattcctggatggattcatagaataccgcagatcccttggtctttcaggaacatcaatcgacctcgctgcagtcagcgacgtcggctacctagccgataccgacgcccagcggcgacaggaggtaatgaagaatatcagctgtcagaccattgacgagtcggaagtcttggcgttgatagccgccgcgttaaccggtgatcttgatcgatcctgctctgggcagtgtgtcacgggactgggactggattcactcgagaacaacttctgggtccaggatgcgaggttcagcgtgctatatgaggccgccaaggggacgctgggcaacagcgcacagtgcaacggcccgtctgtgccgctgcatgtcaccttgtcgactgccccatctaaaaaagaagccttgagagcgtgctacgaggcgctggctgcgaagttagcgcaggtgcttgttctctccttggaggatatggatccctcgattacagtggtttcattgggtcttgactcgctggtggctattgagattcgtaattggattgcccgtgaggctaatgccaatgtgcaggttctagagttgttgtctagtggcagtttgatggccttggccgagattatcctcaacaaatctcaggcctatactcgcactgagtaagatgatgatagcgtggagtgctgcggcggtatacgagccgttagaaatgatatatatattttacatgttgaatcctgattatttgcagattgttttcatttggaatttgaagccgcatcatttctccatatgttgtactttatataatagtaactataacgacgtacaagatacacagggcaaccgagatgagatgtctaacatcctagtagaaatttgctgctatgtatgcaataagagcccgagaagaataggaatgacaggagtataatagcgccagttcatgtggtattttaggcttgatttcacatataggtgaagtaaagaaaaatgcaccagctcggggaatagacgaaacgaatggataaatcaaacatgcctccatgagtttgagataacatgaaacccattaacaaaaaatgagaggaagaacgaagccgaactccaggaacaaagcgcaagagaaacccattgaaatacccatgtggattccaagaaccagaaacgccttggtgatgctaaacaattcgactgagaaagacaaggaagaagaacgctctctccacaactcccatccgggaatgcccatgcagatgagaaaaaaaaaaggtcacggaaacccatcgcataccatgcgccgacggaccgatggacatggataaaaagaaaatcacaacgaaagagacagctagagatctatgctccacgtaagattcatgtatcactcatatttagtgctgagtggagttcccagcaacggacacagccactgcgactgcggcgccgagaatggcactttcaggcgcagggttgaggcgaatggagcatccggcgcccgggtaggttgcctccgccagctcattcagatagttctggcaggcagcgcggaagccaggatacttgttgatgacagcgccgtcgcaagcgatggaaaggctcttgtccgagtctccgttttcgatgacggtgattgcgggtgattccttatcgagagagtcgacggtggatggggtcgcggggaattccacctcgttgcggaggcaccacatactgtggatggctgtcgccaggtagccagcagcacggcgggagactgtctgggagatgcgacgcaggaatcgcaggtcctcgacggagggttgtttgtggaaggtatgctgcttttgcaggagcgcggcggcggtggaaagggaggcagaggagtcttcctcgaggcaggcgacgatgcttgtgtcgaatgaatagggttcacacatggagtgtggtaactcgccgccgaacaggcgggcactctcggtagcctcgacgatgatcaaacgcacaatctcgcccaggtatcgacctgtaatcatgtactcgagcggctggtagtcgggacgcagatgggcgctgttcagtatgtcatcccaccgtgtcataggcagcacgcctccgccaaacatactcatctctgtattgatcagaacatgcttggcgtggtcgaaccagccctcgggacgcactccaaacttggacattccaatctcgtgcaccgggaagtgaatcgccatgttggtaccggtacccaaaatgagagacatgcgggtcttgggatcgacgtaggcacgcgagagtagagctgccgagctgtcgttcaggatagcggcaacctctacgttcagattgcgcttgcggcatgactggataaggatatcacccagttccttgcctacagtgccattggaggccttgaatcccttacccatggggagcaccaatccgctgctgtgcgaggtctgttcaatggggaaagaccaggacaaccccaccaccagcggtacgtcgccacgcccgtagtctgttccaacttcttgcaggacagtttcaatctgccctgccatccagtcgaaaaattgtgtcccttccagcatcttgagttgttcgtcgatgtataccgatgatactttcaagatgcgcagctcctcatcccggccattcaactcaatcaaagctacgcgaaacgtcgatccgcccacgtccaatgccagatatgtgcccttttccgagccagcgggaagcgcggtatcgtaggatggaagcatgcagcatgggctagtttgtaaacattctcggatctgtgcacgaatcttctcggacatgttgaccatgttgtgtgttgacagcggcgttgagcacgaggtttctacttcttcggcgaagttgtctaggctgcggcgtttccaatgggcgccgaggaaagtctttcggcggcgtcgcgaaaggccacggaagagtgaggggaataggatcatggtttcgagtgcggtgaccacgttatggaacaactcttgcaatcggtgtagcaccttgaccagtggcgccgacatagtcggggaaggaagatggaggagaggcggggtcgcgaaccgggggcgagggatggatgttcactataatgaagtatagaggatcatgaagcaaatgagatagaagaagaaagccctgaagttataacgttaagaaggttggggggggccaagccgatgtgacactcccactggagttgtgtcttgagtggatcggtgggagtgtggacgcaataatccccaccgggagaaagtggaaaggagaaggcagaagagaagagaagagggaaaagaagggtgttgacccaaagcatggatcaacattggcccattcttgagttgacagtgtcaccgcgagtgcaactgtttgggaaaaggaagcccttgcggtgtcgcaatccactgggtatggtactgtaacggtaatttatatgttgtggatagctggggttttatctaggggattgtgcttataccggagtcatattaaaaggcccattaaggaaagctatcttgtgccatttctatccagtctatatatcctaatatcatatatatcacacccgtcgcagctgtagtcggggtggtggagtgaagtggagttacattgtgactatattgtgtattttataggagaaccagaatagtgtaatagtattaatagataagttatactacttcctctacggccgaatatacgcagatagaggaagtatttccaatcattgctaatgtgccaaataatagaatagaatacgagcacaggcattcccaatgtacccatacatactcaatgacccccttgagtgcaacggtggtagtcggctcaactggggggtgggggacggttacatgtggaactaaatcttctacttaactcgcctctcttcttgcattttccccctggaaaacacatcttcagcttattctagcccttttcccccctcttagcaatctgattctgaaacatctatccgatccaataccctaatctaggtattctgctctgcattgcaagcgttgcaaccctatctctcgtcggatatatccgcctacaatcttatatctgtagaattatagtgttatctggcacctggatgtagccaactagattttacccctgtcaccctgttacggcagggggcaaggggnnnnnnnnnnnnnnnnnnnnnnnnnnnnnnnnnnnnnnnnnnnnnnnnnnnnnnnnnnnnnnnnnnnnnnnnnnnnnnnnnnnnnnnnnnnnnnnnnnnnnnnnnnnnnnnnnnnnnnnnnnnnnnnnnnnnnnnnnnnaggggggtcctccctttgagcctcatcaaccacgtagcgtcgacgatgctgtctacggcccgggcgtatcaaccactattgatcacgatgataccttccagagtccaaaataataaaatctccgactttgctggcgacgtttcagtatgctgccatgacatcaccgatggtgcaagtatcacatcatacccatcagtaaagcaagggtaaaaggcaacctggtgatggacaatctctgtggctcctcgtgccatctttaggtctcaacaagattgtgattatgtcagttgaggagatacaggacaagaacggcaaggatatcactgaaggtgactttgtctacaccaagtacagaggcgggtcacatgagggcaaggtaggattcccataacaaatctttcgtttgtgctcaagtcctacggcacaaatgacccgtaagtaggtcgaaatgatcatcagagatcaagctagtgcccaacaagaaggtgtggccagctaccctaaggcaagtcctcagcgagaccagttccccacgtcgtggctaatccgtgcacgttataggtcatctacaccgatcaacatggtcatcgagtcgctcataatccgatcactctaacaaagcaaaacagaagtgcagctgaatgactaagaatgtgtggttggcataaaaggaatacccatggcatagttgacgttgtggggtttcgtagttagggctcctagaacaacaatgagcacaatctcttactatccatgtctataatgttcaaaggctagtatatagattccattcattctagtccttatcaacaatctctttattatatctttgaatctgcagattatcgcagtgtcggatggctccgcgataccctttatgttccaagataatcttgtctacattatctcttcattctttatgtgcctttcagtttccattggtgacatctgattctcattgttctattcatttttctcttgtagtaagatgccggagttggcatatgttttccctggtcatagactaaaaaaaaggtatatcaacgacgtgacagtccatattctttcccgccccacattcagcagcaaattgcaagcccaaaattcaaaagtgcagtactcaatcaagcattttgataaaatatccactcattagtcatgcccgacactattactacccaaccaccaggggaacagcctccaccattgaagtatgacaggcttcaaacgacaggggccctaagggcttcgtggataagagaccccaaccaaatctgtccaattgccccctcgcagctcacaatgcaaaacatggaagaagcaggatggggaatccggcaccaaaaacgacacttcccacccgaccaaatctacgaagaaaccgtcgaactaggtctttccggcgagaagctctaccgcaagatcgtactatggaagtccggagtatcgcctggacagtactgggtgaatgactatatgttacaaacagggccaggcgtaattttcgccatggatagcttccggcctgactccgcatattgggcgcaaattgcgcaggccgtttatcaggatgagcacttcttggaggacctgaagtatgtcttccagtacaatattattaatcctgagactatgctgtttgtgcagaagagtctctatgtcgcagcgaacggtcttgtttggccagatgatagacttcatgtctgggaggagaacaccgctgagtatcaggctctactgggtacaaggctcgccaagggtgtcgcgtatttggttctagcggctttcccgcgaggaacgagacgtattgcgaggatcgtgacttggggaggtcgttatataccctacgtacagatgcggtttgatattgagaaggtttgatttgggagatgtgtttgagggttggtagaatttttggcacgaacaatatcatagtaatggaatatagtatttgcccaggtcatcatacaaaggctaaaagttcgtcgattgtaccggggaagacggccattacagatgtccggacttactgtagagctttattctgtggtcccacatctctacttgtgacgcagtgtatccgtgtatggctcactttgaaagatctgcgggcccccggtcccatcatgcatgattatgtcaagagccagcgcccatgcaaggggtttgtacaaagttcaaaacgatcttgtgggtataccccgccagtggacgtagcacacattaaccggaggttgacattaattgagtatgaacgccgcgcacgtcgcccaatatatccgagccgttgggccagcgatgcgcggaaggaacttgttcaagttcgaataaattgttgtcgtgactcgtgagcacgtaggcggaatcgcctccgtttgcacgcagcatgcggataacatactttcccatctctgctagattagagccggtatgcaagtcacccaccccggcgccggacgaaacgaagcttctcccgtgccgtgagagtacggactgatggcgacatactcggcgttcatctgtgcgtcaaagagcaatggcgagattgaagaattaagaaagtcaatatatcatggtactacctagacatcttgaaggtttttatgtaaggagaagaaagcatgtgattttcaacatatcgcgccttccctcttctcgtcctttccttggcacaccgccgtgcaatccgacagccttagagttctccgtctcttttctttctctttgctctctttatactaaccggataccaaaagagagctggaagagaagcaaaagacatcctaaggagaagggatccatacgcgaatgagcacaactggtcatgtcgaggtggtgacccaacctttaccaccagtggatataagtcacctcacaaactttcaatcgacgtatttgaattggtggtaaattcgtttattcagatgaaacatccaccgaggaagcgaaaggaatccatcgacacaacaactcgtcctattgtccatgtgacggactccgggcgagcgaaacagaaaatataacaccgcttcttaaccagtaagactgccaccgtcacactagcatctaggtagggatcaagtactcctatctcacgagtcacgactggaatcgttcgtgttcttctgcgttccacgccaagaccgaacataccatgcggggcatctatgccggctggatctttagcatgtgtgtcagcaggcctgccgccagccctacagccgaaggaactgcttggacctgagggttcgttgcttatgtcgggcgctagttgactagcatgccatggccgaaccacccatgggtacgcgtcgcggagcgctaagataggacgcagagaacagatcgtagtattttcgtgggttgaggtacattttatattccgtagtagactgtaattacttggatagaatctctggtcggagtagcggaattaggagaaacccctgaccagtccatccttatcggcttcggatagaatgccaagacatcccctgaatgatcttctgtcaatcaaatcggtgataatgggcggattcagttgcatggtacttaaggcaaagtagaccgactccgagatgcaggccacgccatcataccagtcttctagcgaccgcagactgaatacatatccacgatgtcggaaataaaatatacgagaggagaagaactccgctgtgggaacgacaaccgacggcgttggcgatgtgataggacaacggcacttgtcagctccactcgacggaaatgccaagacatttcattacgttgctcggcgcggccctctgtctcctctctttggcttctctttggcttctctcggcgggttgttttgatcttaaatttaattaaatggcttttctattctcttgatcctcttatttgcctagcgctgtcgtttgccccccgctctttactcatgccactgacgacgactgtctatatgttgtggtgtctagcggctcttatgtagctttgtcgcgccccatttattctctttttactttcttttattatattcaggaatctacgcttcctagccattctttaacatctaatcatgctttgggcagctgcattactcctgttctcaggtaatgccgttgcagagcgtcatgactcggatttgttgtcgtttgtgacggtgggttgaactttgacattgttggaatcgtgtggttctaatagccaaaatccagcttcctgaggtccgagccttaaaatgggaggttgaataccacgaccgcgagcggttggcccccggttactggttcgttgcgccatatgggaaaatctccccagatcaacccaccctgaaatatcagcaataccaagtcggaccctacatttacgacgacagtggcgtatgtcttgttcccgaaacaaatcaaaaagcaccagctgactcccttctggtaacaggtccttatctgggccggagcacccttgtacgacaatcataatgtcttcgatttcaagccggtgtataacattgacaacgacccttatctgtcgttcatcgtgggctgggaattcgatgattccaagaagggccacggcgcgattgtaaaccaccattacgaggtggaaaaagaggtccaggctctgagtgatgtccacgacttcaacatgcacgaattcaacattatggacggtgggaagactgccctggcttgcacatatcgtgtccagctcatcaatttggctgatttcggacgcccaacggaagagagttatgtcacggttggtgggttcgttgaggtggatatcgaaaccagcaaggttctgttccagtgggattcattcgacaaggttgctctgcacgaatccaacatgttccatgcctcggatcacccagctggatcgcccggttgggattacgtacatatcaatgcggtcgacaagaacaaggccggtgactacctaatctcattgcgcttcacagataccatttacttgatttctggccaggatggaaacatcgtgtggcgcttaggtggacacgaaagcgacttcgagcaggacttcaccttctccaagcagcacgatgtcaagtttgtctcatcgaacggcactcaccacgttatctcattcctaaacaatgcctccgacgaacgtggctctgacgagagggtctcctccgttttgttcattgagctagacacaagtgttgtccctatgacggccaaggtgattaagcgaatcaatcgccccgatagtggcctcacccgactccgtggtagcgctcgcccccttcctaacggcaacgtctttatcgggtggagcgagcgcggttactcgagcgagcacgcatcaaacggcgaacttctaatgaccgccaggtttgcatcagaccgatactcaacttaccgctcttacaagggcgagttcactggtcgacccaccgcgcctcccgatctagtcgcatccgtctacggtacccacgatgaggatatgacgaccatcattcacgtcagctggaacggcgcgacggacgtcgtccagtggaagttctacgcgcaggcctacgaccgcggccagcccgtgctcatcggcactatcaacaaaaccgacttcgagaccatgttcatcgccgatggctatatggattttgtttccgcggaggccatcgatgccgagggcaatgtcatgcacacttctgagatcatgcgcactcaatccccatccgactggaaagcggctggctgggtcggttctgactctggtcctacttatgatgacccgtcaatcattgtcgctgccaacgctcacacggattcgacggctgagagtaccagcgacgaagcggccgaattgatcaacgacagtacctccaccgtctccggcgatcattcaagcgcccaatacgccgatgcgaaggaggtcgccaaggccgtctacaaggcctacgaggtcatccgcggagtcggcgctctccttatcttcatccttttagctggcactttaggtggaactggattcgctctctggcgacatgtccgcgccggccatttcggccgctaccagcacgtcccctctgaggagggtctccccgtggaagaaatccgtctcacttccaacccgcagtcttgaatgtttgacattttttcgctttcaatcttcattgttagcgctacatcttgccccgtttcgcaattgcaatgtttcgaatcaccaaaccgagcttacaaatttgcaaccacgaggaagcgaaaggaacagaaaaagaaaaaaaaaaaaagagaggttagctgcggccatttggtatacaccattctggtcacgatcgtttcatgcatatcatacccccatctggcgttattttgattgcgttctttctatatatctaccatcaggctgcgcttgagtgacgtttctgcatgcatatctttgattgtttagatcctgttttccttggggacccaagctgacctctgtacattcttcttctcattctatgtaatatcacaacccgagattcatttcgcttgacgaaatccatgtctctgtatataatgtgaacctcgaatttagaacatatcatcccgatgcccccttctttgtccaatttatacgccacagttacataatcgtccacatttgcgacttttctccctcggggcgaacgggaaatgtggcggtggagcagacgatggaaataacattggatcggttcgcccggagttatacaattcaatcagggagaagagtcgataaatgaaacaattagcgcggcatgaggctgacgctgacgacgaaatgttcctaaatcgggaggccgcgtcaccgtttgcactggcgcggatataacggatctatgtggcgttgcgtttaatgcgtagatatttatgccggaatagatagattagattaggtttacagagtggattaaatactttttctctacgaagtagaagaggggatgagacttgctctggtacggagcatgcgaactatatatctcgggcggtcactcactccgaactaccaatccttcaagttgaatgattattctctagtaaatgattttctttgttctcttctgggatttatgagtgattttcttccatatgctagctgtcaagcgcaaagcatgaaaccctaggccctctatatgaagtattatacattgaatatatggaacacagatcaatgaactaaaacctaacaatctgaccctttgcaaacccaagcctagccaaaatacccatttggcatctcgatccaaccaacgaatcctccatagcaggaggcccacaaacaaagaccttcgcatcgccatcggccttcacaacctcccgcaacagcccctcggtaatataccccgtcctgaacccatcactccgtccctccgggtgactgactgcatagacatagtcaaagcgacctgggaagcgcgtcttgaagctctccagctcttctcgcagaagcaggtcctgctcggtattgacgccaaagacaaggttgattttagttttgtcggctggattattgagaataccctgcgctagctggtagattggtgtaatacctgctccgcctgctatgaggtagacctgcggggattggttcggtgtccaggcgtggcctttgagtgccgttgcgaatgtgagggtgtctcctggtgaaagggagtggatgtggctgctcgctttgccgtttgggtatttcttgaccatgagctcgatctggccttcttggtctattgttctcttttgttagtctatcgttatgtcgggcttgggtttattactcgtacttagatcgctgatgggtgtatatgggcgtagtacggggaaccagcgtccttcgggacgggatatggtgaggagtgccgctgcagtatgttagtatataagctgttatagaacgttgatcgtaagtcgggtccatacaagttaatgccaatccgcttgtggccttctgatctggaaactcgaagacgagccgttttgtgttgtgatttacatctttcgtgctttgcaggcgtaaggtagtaaatccgaatcctgaaaagactttgggaggttcatttgactctgcattggcagttgatataagacgcgattggacacagtaagctccgatgcctagtaaagtggcagccgaggctgattttgctgttatggactgggggaaacgagttttgaacatggtgaaaattaaatcttggaattattcattgcattacggctatatcaactgggttaatatagtactctcaaattgaggtggtttacttctaacccgcgcctaaaacccgaggcccgtccaaaacccgcagaacccgtaatgagtcccgaccaccgacatgacaatctatgattctatacccagcagactgggagccccatatgatctacaactgattactccatactcttatatagttcggccttttccggaacccaatgggaagttggggttatatctttagtccaggataaaacgacgccattgaaatcaactcgcagtaattttgccacgtattagaaatttgatcaatttgtttggggcatatttaaatgacttcataatcttgagtagatcaacgaaatagcttcggcgccagcgtcgagcaaaatggatatctgagaggctaacggcgcatgcaaaaaaaagagagaaaagagaaagacaacaaataaaaccaggcaacgatcttatctcgtctccgatgtcctcattctttctgaggaacagcttgagcctgttgtataaagctcgccttgcctgtcacttcgttgtaaatattgtacccatagtcggcagcattaggaggggtatacactaggaagctcgtcaacatttgcttcccatttcgatctcatattcagcacttacagtgaagagagacggcaacttggtcagcactcgggttatgaacacggtgcagcccgatatcatccgagatataagcgacgtcattcatggtatgtctcgtatcagacttgatctccaacggaccacgaagattagagtcctgatctgggacggtgtagatagtctcttgaagcgtcccagctaagatcttcatgatgcagtgtgcattggcgtggtcgtggacgggagagcctttcccggggttccatacaaggaggagctggaaggggttagtctctaattctttctcgttgacagtatctctataggattagaatagaactcacaatatttgctttctggtttatgttctcaatggcattgcgggtataattcttgctggtatcgttgtagaaaaagcgggcccagtcgttcggatcagaggtatatttctgcgccagcgagatcaggtattcattgtccacgtctgccgatgaaataccgccactctcgcctaggtagatcttgatgtcttgtatgagatcatcgaggctgtattgaggtttgtagtgcttgttgcctagtgatgagctggtgccaagcgggagtaagggaatgacagcggacatggtggatgttttgacgttggaaggggatagatattcttggaaggtaatgagaagttatgaagaggattcatggatgagttatatgaattcatatctgtttcccctgtcccccgtgcgatcggatctcaatcggcgattgatccgatgtctcgcattccagcgtcctagaccgattacaatctcgcctgatagtcccaaaggtctgaacatgtgcttctagattagtaggctatgttgaaaaaaaggaggtgctgaaaaaggaggtgctaagaatgatagaatctgtaaaatccgctctattcacaataccctacaagacttgaatagaacttcaaacaatctagatattttttagaccaactctcaatattttgattaaatatctctaatctctctcaaggttccaagttctaatccaaaagaccattgatgggagagaaaactaaacacataacgccataacgagaacatccaacgcaatagctgcagttcaaccacccagtactctcgtgtgatttatgatgtaagagtcgtagcctagcatgcacaccaacgtatcggcgaacaagttaaacatgaagtagatccctatgtcattaactgcgtgaatgtgaatacacagatggttatcacggttatcgccggactctatcacgagagacccaacagaggaatagtcggtgagtattctggccttatctcccgacgtatcattgtgtgagtgaaaagcgcatgagattatacaccgtacaatcggaccttggtttgtagaacgaacacgaactagtcgtcgcacatgatggggtgctatgcgtggctcccgactggaacaccgggtggagttcaacgggccaatcagatatctgagatcggcagcacagtcggcgactcaacgaaaaagcccaatcggcgtttgacatgtctacgacattatcgaaggattcatgtttgaaccccctatcatagctattacgtgtccttggcatttacttaatcaaggccgagatctaatgcgcaaccttctacatgacgaggccagctgacgtttaccccagaaaccgttaggtaaaatgacatcggccgtaataagttctttataactggctcccgggtataaccgatctaattaatatcaaagtcagggatagcgctgaaaaacgaagtgttgtaacaagttggatcgatgaatgcgagggaaaactccggcggcatgaaatcatgtccgtctggcatagctggaggaggattgccactagagctgggtctttcttggtcattaggcgttgtggctgccggggtgggtcgatgtagtggttctgaattccattttcccatcgaatccgataagacttccgctgcagaagatcgaagagcatggtataaggactcggccaatttccatgtccgctgggtgctcttgagacagcctagaatgagtgtgacacggttgcagtgatgatcaaaacactcctcggaatgactggtggacgtggcgagctggataagtccacagagggtcaaggcggggatgctgaagggggtgtgcttcgagacgtttggacaaacagatatggaatcggagatccgcctcgaggcctctgttgctttgatactatggactagacgagtgaatgttgatgagagctggccagtcaggccaggccaaaagcgatcatctggttgggagtgggacaatacagatggaaggtcacttcggggtaagtgtaggagcatggcggcgtaggctattgtcaaatgcgcttgaaacatcatttcgtcaacgttgccgtatgaatcaacaatgtcgagcttcttgggcggcaggtggttgatccagctcactagtgcattttcgacagcctggagatgatcgcggtgacagtcgcgtaatcggttcaggacaagaacccggcatagtattgtcgtggcctcgatacggtagctgaatgatgaaaagacggtatcctctgctgcgaggatcctccgtttgaactcaatcatcatacgtggttttgggatatcacccgcacaattatatgctgactcttcgcagggcaaggccacctccggtgacacagtgctacatcgaaatgtcgtggttttgagtgggaccgccatgaagatatcggtgacgtatagttcccaccatgttcgtctcatgctttcggcctcaagagatctttcgggatttgtggatgaagcgaatgaccaacggttcatgccaagctccaacgcaatatcaatactatgggagagagcatcttgcgcctcgtcccattcatcacgggcatacagagcaatggagtatagtagccaagcctggaccatggaagctgaccgatcagggtttgtctttaactcagcaacgacttgttctttgtatggctgactcggaatagacgtaatatagtgagagcccacaaaatgcacagttagctgtaagaagtgagggtaattgtggtcgtgatacaaggagctgggcaccaagattggatgggcgacatgaaaattttcataatacaaccgaggcaggcgatcgtcatggagcgacaattttcttgttgaccccacagtttgctgagtaggagcattgtctgaaagcatcactggccaagagaccggctcagtggtaatatcgagccctgcctgcctgcctgcttgcgccgagggattctctggtgtctgtgcaggtgctattggcagaacaggaaccgtagattgatatcgagtctatgattaatttagtaaaaaaaaaaccatcaagtagaatcgtcaggactgacattgacatgggtttgcgggtggcgttggtatggactctcaagtcgtgatttcctgcgtccgccccgtcgggagggtagatattgacagagcaatccattttgaacacaccgcgaacatgatggtttactggcgtcacatttgagatgctgctttctgcattcagtacaggccagtgaggctagaccacttgttttcgttgatctcgttggagtcatgcttagaaatggtagaatgaagggttgacgtttcaatccccggggctatcggcgtttggcgggcggtcggccggggcattccctgtgtacttcgcatgagaattggttaaaatccctaaaatgctatagatatttgatcatttcatatcagaaattatctttccacaagatcaaagggatatttgcgaacagattttttgcgtgtcatttggggactattggaaggaccatcacgtgtcaatagcacttgcctcttccgagacgtgctactgcttcctgcaactactaccggcattgatcaagatatataccagacatcaaggacatcgcattcatataaaggccgttacctacaattcaaatagcccaatcttcataacccttgggaactctccgatttgctcttgatcaagccaatcaaaagttcgttccggctttcttcaacctctttcaagtcgacgtgcgatacccactcattcactctctctttaagaacgtcgacatcttgagaatcgatgtcaaatttatgctggtgcatgtcaaccaaccatgttttgaacgccggccccaggtgatcgatgaaatgattgaagtctccaccacccccaagagtgttggtcatgataggtccattcaaagcccaacgaaggccaaggccagatgtcacggttttgtctaatgatcaagtcagaacacgtcaaaaacattctatcaaacgggtaatactaaccaaggtcttcagctgagacgattcctctcgcgatgaggctataggcttcagcacaaatagcggcttgaagccggttcgcgataaacccgggggtctctttattgacgagcactggatctttgcctaggcttccgtagaactgaagcgcagccgtcacgtacacatgacccgttcctgggtggggaactacctctactaggggcactaggtgtggagggttgaagggatggccgatcagaatacgggctgcgtttctcttgcattcagtgacaaactccgacgaagggatgccggaggacgacgatgcgataatcacgttctccggggtgtttgcgtccaaatgagccaaaagacggcgtttaaagtccagcctctccggtccattcttatgttgaaaggtcgatcagcaccaaccatgaagagacctctttttgcaatggctaactcacttcttgtattagatctaattcaccaagatgaggatcgattttctcgacaaatttgaaattgttcaagtaatcgctttgtgtcaccttgacatcgggtatgcttgaccaatgctttatcaaataatcacggagtttgccctcagctcctggcgccgggtccgtcacaatgaccttcagacccttagccaggaacagtgccgtccaactagagccgatcacaccggttccgatcacaccgacagttttaatggaaggacgagccatgattttagacttgcgaagcgtttatttcgatctcttcgtttgaattgagattctatagaaattggctatgcgtacagtgaggctaataaatagtatatgaacccctcgaggagacagagacggagcaagttactcaagaggaaccggagtcggcatgccgaatcgggaagaaacgcttcccggaaatgcttccgagatttcgaagagtcagccaatattctgcacagtgccgggttccgggacgtccggggtggttctactctgaatgacgaaccttctttaacgaactcccatctatcctcagggaaaacttcgatatttgtctctcgccatttttatcttttcgatctagctgtcactttgggctgctcatgtccaatattagtaatcctacaaagataggtatggattaaaaagttcaaaggttctatctcatctattataaggccgacgaagctcaatgatctgctggggcgaacgacgccccactgttatggagtatggagtacatacagtatgtatgtaccggataatgcctggaacttgaaacctttcccttttcgtttgagggctcacctcttactgctttttgatcaccgagtaaaactgagcacgttcctgggtaccctgacttgatcacgggctattattgcgaagcgaagcaaatataaatcaaaaggtctcacgtacgtgtcacgtggccaagttttctcctaggggggctgaaacaatagcgtttgggaatatagaaccatctttgcactcctagcttttctctttggctctctcccggtgtgtggtcattggaacgctgaggaggtttgctctctgagatttagctatctggcaatttttattgcggtgggactattgggcttgaagggctatgccatttacctggggcgaaagctcgaaaaaggacggatagtcgcgaaaggctcaacttaggtagttctgatctttgcttgtacgctggaatcaatttgacaatgtctaaacttaccactgttttagccctcacagctcaaataggaaagaccggtaacgtaattcacaagcgagccggccaccccaaaacatatagtaaatgcgattaattacaactcgatatatcaacaacagtagtttatatggagatttccttatggattattgctttttaagtcatatctagtatatttagggagttgaggaaaagttgataccttgatggttgcgttgtatatacttctagcttttggcaacgtaattttcggtattttttgaaatcattacagaatagccttctgcttgctttaatattgatatatagtgttagcaaaccttatcgattactatcgagaaataaggagataaaataaaaatatagttgttgagatataaatgtagaatatatcgcatttactatggtgtttgggggtggctggctggcttgtgtggccggctggcttgtgaattacgttaacgtaattcccggccgagctgcgcacccgggcgagctgcgcagcccagaacacatagtaaaagcgataaattacaacatgataattcaacaacggtactttatatgagcttttccttctagtctaatgctttttatctgatatctagccacttattggagtttaaagggatttaataaattgatgactgagatatatatatttccagggttcagcgacgtatttttcgataccgtaataatggaagaactcgatttatccaaaactgatatataatactgtaaatacttatcaattgctatcggtgagtaatgaaattaaataagagcgttagttgttgaaatatcatattgtaatttgtcgcttttactatgtgttttgggctgcgcagctcgcccgggaattacgttagttacgtatagccgttaactttcagcataaggggtttgcacaacttagggcgatcacgtgttttggcacttccggtgccatttctggccttccggccttgggagcttccgagcctcggagatcatatctctcactaattgttgtctgtgacgtacaaggggatataaatacttcgcgactttagagatgtgatgtgaagctgcacgtccagattactttgtccttctctattctaaatcttcaacatcctactgaattcacaatgcctcatccacacaaaaccaccccgagcaccgatatctacggtcctgggagtttcatggatacggagttcactccagttccccaggatactgctcgaatttttgagtatcttgcaaagaacactcctgggttcactcaagacaaagagctttggaatacagtcaagtttaatggtagcgaactaccgatcattcctggtccaatcaaggcccctctcattgcagctgccctacatgccatgtgtggagttgtagcccacgaaattgtcgaaggtcgtgatggcacatcggcacgtacccagcaggtcaccgtcaacaccgatcatgctgctatctggttgggaaatatttttgcggcttccgtcgaagggaaagacgtgcctgaactgttaaggtcgcgtcaactgtcagctcttttcccgcaggatttcgagcacggctgtatgtccacaccgataaaacaacgaactactgctatctacaagacaaagacgccgggggtttcgtatcaacttcacggttctcttgatcccatgccagtcctgcaatccatgggaatggatcctaattaccctgccaagacgttcgatgaagcttatgactacatcagccggcatgtcgagcaatggaccgcagacgagttggaaatgcataacgtcaagaacgggttttgcggcagcatctgctttacaccccaagggtggttagacacgctgatgggaaagacccttgcgagtcacccactagtcggctactctcgacagtcgcatgcaattccgactcctccaattcccttgcctaatatctcggacgataagcggcccctagcaggtatcaaagtgattgagctggttcgcatcattgccggtcctgtcattggctccaccctcgctgctttcggtgccgatgtcattcgcgtgaactgcagccgcttggtagaccttaatgtatgtcgtgaattctggccttcaaacttctttatactgactgataatgtgtataggctttacaacttaccctaaacatagggaaacgcactatcgatattgatctgaccaaggacgaagataaggcacgactgcgggaactcattgagggtgccgatgttttcgttcaaggcttccgccccaatgcaatcgcaagaaagggcttcggcgtcaacgatctcctcgagatggccggaaaccgtggtaaggggatagtgtacgtcgaggagaactgttacggctccgacgggccttaccatgaacgacctggctggcagcagattggggatgcagcctcaggatcgtcctacgtgatgggccggtctttaggccatacggatggtttgggcattcttccaccgcttccaatctctgatatgaccactggtcttgtgggtgctgtgggggctcttatggctctccgggatcgggctcaacatggtggctcatatcgtgtgacaagctctttggtgaaggcagatgcgatttcactggagcccgagattggtctttactcgccggaggttgttgaacggagcaatcagctgttcaaatgggatcccatcagccctgcctattttgtcgcggagatccttctcatcgtcatggatggatggaagagagttttccctcaatattttgaagaatctggaactgaatcgctcatgaccagtttccaagatgggccatttggccacatgaccaccctgaagcctgtggtccagttgagcgattcgagcatgacaccgcggtggttgacacccgcggttccctactgttatcatcctcaaaacatagaatggctgtaacttgctcctcggaggggtctatcatgtgattctaatagtggtggacagatttggcgattgaaattcgagtgcgagttcatttgccaatacttggggatgatcttgtgatctggagcaggcatgaggattgcaatacaaagtgttcgagtcagttggcagtgaatgtgtgagaggccgataagtttcggttttcatgcctagtttccctcgcccatgtatcttctcccatgcatttttaattctatcactataatacaaagaatattcatgttagggccaagcgtatatagagacaaaggactcgacaacacagataaaataactatattctcatacagggacactctccatggatcagcgcaaatcacaccgtggtctcctactaatctggtagacttcagcccatacgctaaaatatgccagatcaaagatctgaagctgctatgactattacctggtcgtcataaatatactcaaatcttggtatatctaaatttgaacaccatgtgatgcatgcaagagaatcttcagtacttcagtacaatgagcatttactgctggactggtgataaccatcttttagcaacccttctgagtgaaaagaaaggtctgatgttctgcattagtcgaggctatgcttgcattccccatctttcagatggactggtttcgtcgtccaactgtgcaaaaaacaaaggccaatcgttccaatcaaacggataattctcaagccaggccaagtttcctatattattttgaggctcttgtccttccatggttgcgccttgaatcattgtgctgtcatagtcgacttcgtcttgcgaaccttctccggtggcatagtctgctccagagccgcgcatatcgatatgttcttggatcaatttgaggacggaactgcaccgcgaagccaatgtatcatacttttcataatctttgaggatcttacaagcctgttgcaaaaggcccttcaaacgaacgaaagaaaaatgttccactatctgtggggacatttgagctgcaagcagaatagttgtcgccatgtatatatcttataattgttagtggctgacaccgttatgcctcatttacgagagtaactcacatgagacggtgtaccagttcgagggtaatatatacgcttgcgtctgctctggtaaatttctgatgatgaaatctatcatatcctcagcagctttgacacactgaatttggcaccgaaagaccacatatccaatggtttgatcatccgagtacaaattggcaccagaagcattgtctgcctttcgatggcgcatctgtgaaaggaacggcctaaaaaggaggagccgaacagaaagatatctttcaacaaaaattagtccggaattcacattctcgtgtatcaggatacaaaccgggcgcgtaaaatgttcgcttgacgtttcatatgctttgtcggcgtcgggtcttcaaggtccaatggcattcgaaaataagagtgaaggttttcggtccaattgcatagctccgactcgattctaaacaggcttgtgaatttatcgaaggataatggtgagctcaagttcacaccggtgagatttctgcttagatcagggtcggctttggaatcactggagttatagaaggtttctaagacgtcgcctatgatgtgatgtagtcgacagaatgatatgtaaaagttcatattcgaaggcagagttgaattcccagtgtccattgattgtagcaccaaagtatccaatccttgttttgcaacagcttggggaactttgagcgcgcagccaaaagtcatggaagcaatcctatataaaattagcccgcgcattgaaaatatcgactcttcatatcatacctgtccatgataatgcatccattccaaacctgacgggcaaggtcccgttcatgtgggtttttgattgattcaactgtggcaggtaaatgcaagcctagatcttgtgcgatatgaatcgccgtgccaatgcttcggaatgatttctggggctttttgtcgtgttggaaatacaccgctgtaagcaaaaggatttgaatgatttcaaaattgtaaagttccatcagttcataggacattaatccttgggctctctgaaaaaaagcaaccgatgattgatatcgagagagaggtgtttcggcctgggaaactacacaagacatggcaaacatgatattgagaatgcagtgcaaagccctctcgttcatagagatttctccctctttgacccacagagtctcatatgcgttctggatagacgatttgtcaagccaggggtagatattatccacataatcccaatatagactcattaagttgtcagccaccttccttgtaggaagagcaaactgcgtgtcagagggttctctgctagcttcctttttttgcaactttggcaacttttcgagcggtttgggcgaaagtcgacttctttctttccggttattctcagtccctctttttgggcgtgtcgcatttccaacttcatgcaagatatgcgccccgctagatgcgccaaaaagactgccgttagatacgattccgctgtacaagctagcctcatcgttgtcttcattttgagagcagctgtttcgacattcgctcctgtatcttgcctgctcggcgttacaggaggcactgtcgatcgtagccttctctcgggcagtatctgaactgtgtgttgctcaatgcgtaagctgatctgtaggtaatggaccgcgacaagtgagccacaagcaaacatcatgagatgcttggctgctatatattttgaagatgattctattccaagtacttacggcatacttgatgaaggagagactcgatcagcctcccggtatatacatgcttgcgaactttgtttcctttttgagcaaggcccgcatactaccacaacacatatgagcacagtatcgatcgcactcttcgacttcgtcgtttcattctcttacctggtctagcaccatcgcattttgttttcttggctttacaaacgttacatgcgatgctgatcttgcaacgtttcggttttggttctttcgactgttcctgtgaggaagagtcctccatatgaaacgagaacatcattctgcgaccaacgtattcgaaggcagaaccttggaagtgttgaattggcaagtctcgccgttgtttctcggaccgggatttcggcatgtcctattatgtcatcatttgtcccgagttgcgagacacaggcctgtgctgtccaggtctgacctcaaatatgttctcatgaccttgagtgccttcgtaaagcgccgatcgggaaagtcgcgaccgcggcctaaaatccggtatatacagctccaacgtacgattgataatggactccatcagcaagacgtcaggtttcaaccgtctgaatataagcccctctcaaagcttatttggaactgcaatacgagctattttcggcaaagtggcttgaaaatgactgtatatgtaggcttaattgcagatcgtcggcaaatcccgcagaagtgtctcaaatataagctgacacttgcaatataaaaccagatgggttgtcttttcttttgcaattccattcacaattgtcttttactgttgatccggcattctatacatcatggctctctccgcatgtaatgccgtgtcaaacccttcttttgaaaccggcatcctggctccatggcatccatcggccgtgaatgtggcccaagtaagcaatggcacaatcgcatacagtggtgattattacctgtacgaatctccctccctgtccagccaaactacaatatcagatactaacgaagtgatgtgtaccagtaaccttcaaaccgcagtaggaaaccgcggcaacaccatctcccagggcttaagacacctcaagcctcacacggaatacaaattcagtgctcaggctcaggttccatcgccttccggctcagagtactgctcggtctatgtttacgttggccgcaatgcaacagtcggtagcatcgcctcggtacagctgttcaattttggggagtggacggaggtcacagggagctatgtgccaaagagggagaatgagatcttgagtattggcgctgcttgtgattcggaggattcttcttatacggataatgttttgtttgatgacattagcttcattcccaatgattgtgcgtatggtttggcttagaaatttacagaggaagcttttgttgcgcatatatataccgtaccaagaatttctagtttcaaataaaaactcccgctttatatatcctcaatcaagaactttcacggccatcccatcattttgatcactgacgaaaactgtgaagaggatgggaatcgaagataaagaatgtatgctgagaagtatctcactatcgacacagatcctccagcaattccaacatgcgttgctgcaacttcacaagctcggacttggaaattggcgatgaactggttccagttgactcgatctggcttcctggatgtgagccctctgtgttggttgggccatcttgaaccagctccttccgaagcgtaaagaatggaatacccagaccgcgcaattcggccatgatcgcatctgccatttgcacggccgccctatgaacctttgcatcgtaggttgcaatctctgcggcaaactccttttcagtctaatgacaatcagtcagagcgaataattaacataggcaccgagaacataccgagccatcgtcctctttcacaggggcaccgatcgacctccttgtttagcgttagtgatccgtcgctagtaaaataccgcagagcagcatagtgatagactcacaggactgcatctagctctctttgtttctcggggcgacctttctgctgcttcaataatgcctcgcgggcgtggaaccattgttgttcatgatggtgttgacttcggatcacaccgcgaatgcgcgcttgggtctcttcgttttgacctacggtgcgcatcacatgttttagtgctgcgggccaagttgtgatagtcgaagagtcagagtcagatccagaagtagaagtggtggacggtctcgttgtccttggctgcagcggtcgtggatcctccgagggcttggattgagaggatttgatttttggcggttgactaggtgttggtataggctgattagagcaaccctgaccctgagaagctagactagacaaggtgctgaggactgagttcaggtccgaggcattgtaagagccgtctcccatattgaaatagagcctttcgataagatatcgtgggatgtataggttactccgaagtttccaattaatatatcgacactgggtctgaattgatatataaagattgagaatggcgagtgaagatcgatgtagatgtcaaagtgttccaaagacggtcgacgtaggatacatatgcagagcaaggatggagaaggggcgttgagaaagaccagtcaattttggcataaagaataagtggtataatttattgatcacatacaaattacaaattccccaagatgagaggacggaaaggaatgaaagaagataaaagtgatcagttgaagctgttttgaatgtcttggcgcattcccgtgctgaaaatttaccttcaacctgcaaatccccggtttatcaactgcctccagatccatcaccccaccacggccctccaatcgcctccgtccaatttccagtaatatcaatctgattttcaatccctatcttcaactctccccccgaaaccgggaactcccaacatgtcccgatccgccgcagacgcaacgcggttcacggccaccgggccctacgcccactccaagaccggcggcgcgaaccaggcctcagactttgggaagaagaagtccagcgtgaagtcatcaccaaagcaacttggcccgaatggccaaccggagacacccaaggagaaggtggaacgactgcgagcacaggcacgggctgctcggaagacacaggcagctggaagcagtgcggaccgatggattgagtctgggcggaagtttgccaataaagcacacaagggaatggtttactcattgattgccgcgtccggtacgtttcctgccctgtgggatatgagcaaaatactagcaacacaacatacgatcctccgaagtccgagtcagcaatgacaagcaacggacccccagttgatccctactggacttatactaatccttctatgttataataggtgtctgcggtgttcttacagtctactcaatgatttcgcttacgctctataaccgccgccaacgcacgctttggatcgaaaaggaactcaagacccttaaggatgccgagatcgcctacgccaacggtaccgcaaccaccgagcagcaagagctcctgaagaaggagaagatcggtgaaattatgaagcagaagcgcgaggaggagaaggcacagaagccctgggccaaggcgaagcgattcctcttcgagaagctaaacatggaagacagcggtgccaatcctgcaccaacatccgcgtcagccttggctatcgagggtgccgacaagggccaaggtagtgttatggaggccgtgcaggccaagcaagctctcgatagtgctgcggcgaagactggcgctcctttgcccggtcagttggatgtgctggctgagaatgtgggacaggctgcgaagagcaagacatcaagctggactagctggttgacggggcgatagattggggcaacctttggtcctccaagcaaacaaaaagaaagaaggacggactggatgggctggcatgatgccataacctgtcctcggatgcaatgctgatctgatttcatcatctaccagcagacataatctggacccatctctctccctccgccgatcttcactcctcgccatatgcgataccttttctcttgcatggcaagtcgcggttttttttttttaaatcgtggcctgcttccattcttccagggggtttacggcgttttcttccattgtgtttctggaatgtgttcctagtcagtatggtctttcctgacactccgaagggagtgaacggccgggcttccatgtatatcgtgtacagtacatagatctgcttatatctgctctcatttctactctatcctcaggtcccacctaaatagtacctacatatacccccacgaggatacaagcgcccccacgacccgctggtgactcattcctgggcaatgatttcgacctaaataggcccatctaacctaagtttgcgcactaatccccaaatagggacggacccatcctcaacaccggagaagcgcttagccgcgggctaacaagtggagcagaaaaaataaaagatccttggagtacggagtagtacaccccggagaaaaatataaaaagcagattcagcccttgatcacattcctaaactttttggccactcatactatgaaatcgtcaacagtcccagcgaaccgcaaaccccccaaaatgttcttttttgacaccagctacacattcacacatgaattccaagggggtttcccaaggaacaagcaggaaaaaaaaaggtacaaaggaaaccgctgaaaacccgagataaagaaacaacaggtaccgaaacgaggtatctatgccagacccgttctccctcctctccgcggaagaagggctgtgaaaatcagagacaaaaagggcatgatctacagagaaccgaatccctctattgctgcgcttttttggcagcacgacgagcacgaacaccatcggcgagatcctcgagcacctcgaccgtcatctcccagttgatgcaagcatcggtgatgctgacaccgcggaggagaccctcgggtccctcggggggaaccttctggttaccctcgtagatgttggactcgatcatgacaccaatgatggcagtctcgccctcacggagctgttcagagacagccttggcgacgacgggctggttgaggtggttcttgttggagttaccgtgcgagcagtcgaccatgaggacctcgcgcttcttcttggagcggagagcctcacgggcagtgcggatgctgtcgcggtcatagttggtgcccctgtttccaccgcgcaggatgacgaagccgtgctcattgccggaggtcttggtgatagcagccagaccctgcttggtgacaccgaggaagcggtgggggtgcgaggcggcgccgatggcatccacggcaacggtcaggttgccatcggtgccgttcttgtagccgatggggaaggacaggcccgaggcgagctcgcggtgcagctgagactcggtggtgcgggcgccgattgcgccgagcgaaatcaaatccgctaggtactgtggggagatggtatctagcatctctgaggcaatgggcaggcccgtgctcgtcagatcggtgtacagcttacgggacacgcgcagacccttgttgatgttgaaggtctcgtcgatgtcggggtcgttgatcaagcccttccagccgaccgttgtgcggggcttttccaggtaggcgcgcatgatcacgcagagatccttctccagttttacggaaagctccttcagccggcgggcgtactcaagtgcggtgtctgggtcgtggatggagcatggtccgaccacgactagcaggcggtcatcgcgctgctcgatgatctcaattgcttgattccggccggcgcggactgtttcgatggcacgagcgggctatacagacaattgttgtcagttggtgtgcttgtagttttgccatgtcaccgcaaatagcggggtgaaaaaaaatttgtgacttaccgcagggatctcagtctgcaagaagtagggtgacagcaatgggtcgtatccgaggactattaacacaaagatcatcagtatctctcacacgcaaattggctctggacacaattcaacataccacgactgtcctcgttgacttcagtggtcttgatgaggggcatggtgatgctcaaggaacactggtggtgattagtatagattatatagaagattataaacagaagatccccagggccaaaatgcaatttaaagcagaagaaatgactcacaaattcgaggtgtcgaggaggaaagtagtgggactaaaaaaataagaggcaaaagtgggccgagagatttcacgggtcaagggatggttttgagtacttctgtgtactgtgctatttatgggatggttttattagtatttggtcttctcatactcttctcactattggcttccaacatatgtataatgtatccaagctgtactctgtacgggggatgagatctagttgtcttggctggctggagaatatgagacgtccaatcacgggaccggagatgaccacaagttatacatcgcactccggctgacctgcatatcatgtcatgtacttctgatatctgcagcagtcaggagatttccatgcactagtacatggcgagaaaatcaagaattaaacagccagctggcaaactccagtttcatattccgctggactcaactagcagaaaatatggtatatcaaaacattgccttgaagaccacagcctaatcttttccaactttgaatattgaacctccaagccaggatcacgcacacgggctttagctactacagcagtctgtatacaaagtacatttaaatggccgtcgccggttcctcgtaatcttaaattcgcccgactagaaatggctttgacttaacgtctgtaaatgacatgaacgatgaagacctgtcttacaactttgcttcttgaactactcaatttattctcatactgcactatgcacctcaatctctttatttctagacccctctatagacctgctttgagcgttagtagttctatcaatttgcaattattgcctaggcgacctctcctttgatacctcaaccgccaggaacacaacactcaactgtcgcacccacgtcactcttaatccacctataatactctacttcgacatctaaactcatctattttttttttcttaggcttgccttcaaatacttgttctaacgcagattggtttactggcagtattgttctccaatctcgaagtgggacaatctgcagctctttgttctattgcaatgggatatagaattcatgaagacagaccttgattcttgttttgatgttttgaagacttttaattcataatcgtcacaagtggttacctagtcaggtcatatcctctaattttgctgttatgcaccccatgaagtgttgacaaaaaggaggtaactacactctctttcatgtttgcttctcgcacgctgctgggtttgactgtgattgtccttctctctctttctatctgtttacctttgttttcaacttcccctcttgatttttatccttccttttcttctccccccgtcatcttccatcaccttcaattctctgactgtctacacttttcatctctcttcaagcatcttcagccgcgatgcctggcaacgctggaagcaccgttcctttgcgcatcagaatgaagaaaaataagcccaagaaagttgaatctgagatgaccgaattggcccgcgtgcctcgcgcgccacagataccccagaatgagaaatcctaccatgttcaggtaaacactggtcctgacctcggaatcacactggcatagcctgcctcgtctattcgcgcggcacaaatcccatcttctagatactgataattatggccagggaatggtgggctgcgggcacagctcgactgcgcatggtccagccaccaagggaaacggcgaccacatagctgtctctcccgagaagaaggacggaaaggtactcgctactgaccgtcgcttccatgccgaaaacgagtatcccacccgcttcagcttgcaagacatggaaagcgacatcggcaggtggatctgtcttgcttgtcccctttcaacccgcaaatgcaaggactgcaaacagtacgaaggtcacgaagactccctgatcatcgccattcatggagattgtgttaccgacaagaccggaaaacgttcagcaatgggattgttctacggccgcggcaacaccggcaatctctccttgccccttccaggcaaggacgaccacagccacacgacccagatcgccgagttgaccgcctgcctgcgagcattgcgcaatgcgactagcatcatcgaggagcgccacagcatgatgcgcaaaggcaagctcctcatgccgctgaatgccttcgttatcaaaacggactccgagtatctcgtccgcagcttgacggagtggttgcccaagtggaagaacaatggatggaagacttgcaagggcgctccagttgctaatgctgacctgttcaagttgatcgaaactggtatcaacatggttgagttggtcgtccaggttaagttctggctcgtgcccagggcgaacaacttggaggctatttgtctggcaaaggtggctttcatcaaatgatgagccaggggatccatcgatatgtccctcagtagggatatcaattagttatctcaggatctctagtttaatccaaacttctatgatatcaaattcgggaatgtctcgattctcggcttggcttccggttccaaagtgccgaaccgaaatagctgacataagcatccgatgggctcccgatgtcctgtccagttcgaggtgcatgtctatcattaggattattcggtattgtagaatctccggggagaatgtgtagaggctgttagaaatcgacgtacaagactaggaacatcgacttgaatcaacttttctccccacatttcgcgggaaaccgcttagccgatcttcagtgccgcgaccactcagcaacggtagtcgaccaaactacttccgaccccggaattttgtccggcatttgcctataagtaatattggtgtccccgggggagtttggatggagttgttgccggtttctcgcttttctctttcttgcatactttagccattgtacatatgtgagtaacagtccgagctgacattcaattcgaaactgacggcgccgagaaagatcagaaataccttgaccatcggtatacaactttcaactaattccaatccaatcaacctacaaaaccatggcttctccaattccccgcggacttcgccaagtactccagaagtctcccaatgacatcgtcattctctcctcgctgcgcacacccgtcacccgcgccaagaagggtggtttcaaggatgcctacccagaagagctactagccagcgtgctgcaggcaacactgaaggcaaacccgaacctagatcccgcccaggtcgacgatgtgctcatcggctccgtcctgcaagaattaggcggcgccaaagccggccgcatgggtcagatccacgccggcttccctcactccgtgcccttccacacgatcaaccgccagtgctcatccggcctagcagcgatcacaaccattgctaataacattcgcgccggcgccatcaacatcggcgtcggcggcggcatggaatccatgacccgcaactacggctcccgcgccatccccacagtcctctggcccgagctgaaggagtcccactcccaagactcccgcgactgcatcatgcccatgggccttacctctgagaacgtcgcgtcccgctacggcatctcccgcgcagaccaggacgccttcgccgtggagtcccacgcaaaggcctccgccgcgcagaaggcaggccgcttcgactccgagatcgtccccgtcactactaaaaccctggacccggagaaccccgatgcccccgccaaggatgtgaccgtctccaaggatgacggtatccgccacggcctgtccatcgagaaggtgggctcgctcaagcccgctttctcgcctaccggcgccagcaccgccggtaacagttcgcaggtcagcgacggcgctgctgctgctttgttgatgcgacgctctaccgccgaggagctgggtttgtctggtgccattaaggcgcgctgggtcgcgtctgcggtcgcgggctgtgcccccgatgaaatgggcgttggccctgctgttgccatccctaaactactgcaggctgttggtattgaggttcccgaggttggtgtttgggagattaatgaggctttcgcctcgcaggctctctacagcattcgcaagcttggtatcgaccaggctaaggttaaccctaatggtggtgctattgctatcggtcaccccctcggtgctactggtgctcgccaattggctactttgcttcctgagttggagcgcagtggccaggaaatcggtgttattagtatgtgcattggtacaggtatgggtatggcgggcatgtttgtccgggagtaaattgttttacttgctttgcacaaaatgttcttttatatctttcccttcgtagcatgataccagcggtgtatgtgtatttacagtttgcatactatgaatgaatacattgaagaatatttctcattcaacatcaaacgtggcctttttttaaagaaataaaaagagacagactaaatcactacatgcaatttgatgcgtaaaatgattgatttgaattattaaacctcgccttgaggtagtgaggaaaaaatgccaagcatcaatataaccaacacgtgactcgtgcctttcttgaatttgtttctccgtccgggccaactccgccagctcgacgctcataaagaacattcgcgcccacctcgacaatgcggccctcaatgcgcctccctctgcgggaggcaaactttgtctgttccagctgcagaattcagactaccccccgtatctcgccgctcggtcaagtccgccaatatgcctccgactcccccggactcctcgaacgcgctcggcgcaagatttggggcaccgacaagcccccaggcccagcagacccctacactggaagtcagatcatgccaggaactgatctggcttctggagagccggtagcagaggacgcattcagtctcgaacagggtgaagcactgtctgaagaaatcgatgacaacctgacctgggagggaatgcccaggattggttatctaccagagaaagaatggcgtcttcagggttcaaaggggccagctgataaagtcaaaccgtatgtttgatccaagtcatcaattcgatgcttctacatcctggtttgattttctcaatggatttgctgacaatgtccttcttgattgatcgaacagatggtactacaatccacgacctttaccatacatgaaggctgcgcatcaagctgccgtggagattggtctgatgcaaatgttgttggggcagaacgtcaccgttgttagcaacctcaacctcaagaccgaagcacagctcgagtcggttaagatcgaaggccagtctggtaactggggcgaccgtctccgcttccccgatgtcaaaacaatgaatatccttctacgccatgcagcagggagtttgaaaggcaaagacgccaagatcgctcaccggaaattgcaaaagatagctggcgagaagggaaatcgcctgtatgacgcagagtccgagggtcaaatgcagaacagcatcagttccctgtcactggctgatggaaacatcaagtttgttgtacgtattttcccttcgacattctcataaccaacattactgataaccacatctcagttcttcgcccgtctctccaaattgatgtctcagcatattcctgaccacatcatcacctcttccgccaccacgagtgatgtcttccgcgcacaggaggcacttcacaaaaagactactagattgacaccggtgcttctccatcaacttatggacaagaacggtgccgctcaattgcctaacgtcaagattctcgatgttcgccagacccgtcatgaccacgatgaagatcttggccgcaagaagcttattgtctctacgctctacaagaatggtttgatcacaaagagcctgggccagaaacaaccggcccattggaagcaagctaagaagactgaggcgaatgcgtaagcctctccttgtgttttgtagaatgttggaggcatacttttccctttatctgagagcaatcttttgtacattagaattgttgattgaattgcatttttgtcctttgtgagttcagataattggtatgtacggtatatctacctgtcgactcgtccaacataaaacgcaatagtcatcatcaatcatcgaagaacaccaaaagcccttgaacaccggaaataacactccttccatgacttatctcacattgaaaagcaaaggcacttcattcaggcctcacgtctacctgcgcagcaggaagaacacaatcaggtcatgatatagaaaatcctcttgtcatgaaatcacgattcttggacccgccgtccttcttcgtgaagagactgtcgagattctcattcccacccatcatcttccggcgcttcttcttctcattctcctccgccaacacacgggcagtgagcgaagaagtagcggcgttcttgattccattgctagaagcagtattaggcactggtgtggaagtgttgcttcgacttttaggatccgaggattgcttaggtactaccaatccagcaggctctatggtaccgggagcatcagctactccctccgcggaggcgttcttcttgcgcttctttgagccgggggctttcttgagggaatgcgttaggccttgttcagcgagtttatggcctcgcgcaatcagacgttccttatcttcttttttggtggtaaggatgttaatgatattgtcttcgatgtagggttcgttgcactagcacacacacgtcagccactatttccgctttgtatcaaagacatgattcttacctgtaagcacttgtcgcctttgagctgtcggatagcctcctctgcaaatacatgtccacacggcaccaggtacacagacttcacactcgggcccaacggcttggcggtgaccgggcagatccagccctcgcgacgctcacggggcgcataagcacggcctgaggggtgctcggggagctcagtgtcgatttcgaacttcatctcaaccacatcccggagcgacttcactcgcccgcatagaatctcctcgcagtctgccttagagctgatcccctcgacatcgtcgccgggaagcaggaactggagaatggcgtccttgttataaagatttccgactgagtctgatacaattggccgagagagggacttgtgtgagagcgggcaagtagtccaggagtgctcttgctgctcgcgctgagtctcttttacttgcgccgtgctcggggcacgggctgcctcgcgaacgagctcgcggcgagtcggaatactaaaaagctttgtgttagaatttttgagtctatggcacatttataatagagtcgcttacctgccaccatcattacccatatttgcgatgcggttgtaaaatgcccccgacttcgccacgataaagttggaaagatagcgcgctgactcagcagcgattagatccagggcccgctatcaacagctggccagaagctctctccgcaactcgacaaacaaagctcaatgcctcaagcatgagacttcctcagtcgttattcttgctggctgccgctgggtcggcggtccaggctagtagtgacaagcctgcccgtccccgtggcttgggcccagaatgtgagtatctgaaccctgactttctagatccattatttgcattattgtttgcggctggttcatgtagcagtgatctatgataggcaattgatcctcttatattagagattacactaatatagtatccttagttgccaaattctaccaggactcaacgacattcacctgtatctcgaatccctcggtcaaaatccccttctcggccgtcaacgatgactactgtgactgccccgacggaagcgacgagcctggcacgtctgcctgcgcacatatttcgcgcaattcgccactaacggtggccgaccggcctgggaatagcgaattagacaccgtactcgctcttccgggattctactgcaaaaacaagggccaccggccatcataccttccattccagcgtatcaacgatggtatctgtgattatgaggagtgttgtgatggtagcgatgagtgggctcgcgttggaggcaccaaatgtgaagaccgatgcaaggagattggcaagcaatggcggaagcaggaggaacagaaccaaaagtcgatgaatgctgccctgaggaagaagaaggaccttcttgttgatgctggtcgccagcagcaggagctcgaggaccatattgctgcgctcgaggccgaggttcagggtgctgagctcaaggaacagaacctcgaggctgatctgaagctcgcccaggagcaggaccgcaaggtggttcgtactggaaatggcaaaggtaatggcaaggtcaatgcccttgcaaacttggccaagggccgtgttgacgagctacgcaatgcgttggtcgatgtgcgtcggcagcgggatgaagtccgcgagcgggtgaaggagcttgaggatattctggctaaggtcaaggtggaatataaccccaatttcaatgacgagggtgtcaaacgtgcggtccgtagctatgaggactacgctgctcgtgagcaaggcaccgagggtgtgaacgctgccgtcgaccgtgacttagacgagattgccaaagccgacggtgaagaacatggtattaactgggaacactgggaaaacgaggaggatggatgcaacgactcggatttaggtaagatattccgtgattccttgtgacaccttgtatagcttaccaacaggaactatagtgtacaagctcgctgcttatctcccaccctcgcttgtcagcttcattgaggatagggccgtttctgttaggagctaccttgaagaaaagggcattcttcccaaggccgataaagactcttcctcggaatccaaggccgtgacccaagcacgcgatgcccttaaggccgcgcaagatactgttacaagcatcaagaacaagctccgcgaccaccgtgccgaccttgagcaggactatggccctaactccatcttccgcgcgctcaagggggtatgtatcacccaggatgcgggtgagtacacgtacgagcattgcttccttgagtcgaccaagcagaaccagagaaagggaagcaattctgtgtcgatgggcaaattctcgaatgttggaactacgaccgtagaagaggtcaacgcggctggcgaggtcgtcaatgtcgagaagatgacgattcaatacaataacggccagtcttgttggaatggacctaaccggtcgaccaaggtcattttagagtgcggtgaggagaacaagatcttgaagacggcggaagaggagaagtgcgtgtatgccatgcttgttacctcgccggctgcatgtgcaagtggtgaggaagcaggtaatgttgcgcctcgctcgaaagacgagctgtgacggctatagatctagagatctggtgttacatatgtattgaatgtttatttcacgtgcatctcattcattagaatgaattgcaattcgagcgctttttacccttgtattcttgttccttggtgttaaagtgaacatctgtttctcggtgatcggggttcgattcaatcgacgtatgtcaaagacatctgcatagccctaaactatgagcatagtcgaaacacatgtattggagcatacagatactactaaaggtcatgaatcacacaatataacatcttcatagttgactaaaaattaaatcacaagaacacacacaaggtcaaatccgaacctataaacttaacacctcatccacaaggccccaggccctattatccccagatcctagcatacaatcatctcggtcatgaacgatcacaatggagttatctcataactcgacgaaacaatgagctagtttgacagcagtggaagcccgggtctagtgtgggttgtatgggaggaagatggcggtgatgaaggccggtgggttggcttagtgctaggagggtagttagtatatcttttgccctagggccgcatcccactatgagtgaccgttataagacagggagtgagcacgcaggtacataccttgcagctagagcaggagcaagaagtgcactcgccggagcagcagttgcaggtgcaaggagacatgatgaagatagagttggtaggtaaagaaccttgaaaaagaagcttaagagtaatgtttggtttggatgtagacggcttggatagagaaagaaaagtctaacaggggacggatatgagcccagctttatagattcacgactgctacggagtaaattatcccgatcaataatagcgcgcataattctatttcctcgtccatcatgctccctccaatctaagacgctgtaatgtcgccgcgacccgttcacactccatagtatcgcgtggtcgagtcaaatgagcccagccctgcatcccactcaacccgcctgcctatcatgttcttcaagctattctcacgcgctatgcgctgtaaaaagaatactctggccagatgctcaaccgctcgccaagcctatcaggttctacctatgatgtaaacttttacagtccgcccgccctcgggcgaatatggcgcaaaagccggtgagtagattagtatccgatctattttcttgcgaagtctaagtgttatctttctcggtgttttctcgatagtataatgggtacaacatgaccgggttaatcaggctatgtacggagtagctcagattgcgttgtgctcgggccgggttcctgcgaagaatatagctgatccattggcttaggctgaagactaagaatcttgcaggggttcgttttgtggagcaatggtctgcattgtttacgttgcttacacttccagatacggacatcgttgcctatacatgtgtaagttgtttcctttgaacgtcgactactagacttggatatgtttcattgatcatatgttatgctatgtggagggatatgtttctaagacaatatagtgaggtgaataatatatgggataatgtggcagcacaaaacactccctattagtgcgatattaaaatccaacccttctactatcatgccacaatgacggccacgtttcgggcacgacgtagatctgcatgcctcggtccactggtttcgggacgggcctgttattatctcatgagtacagtcataactatgtacaacatgcgtaccatgatgtggagtgtaagtactagaacgaattaggataaacgtcgtattcaaaggaaaaacggagaatacacagcaagtaaaggccgagtgtgtaatttcccgcgcctacagcggtttcaggctgggctattgtcgtggcagcctatgaggcgaagtttgctcggattggggaccttggaggaggggtgctacctggcctcattggcagccctggattacctgagatatgtccatatccacacagtggagcatgccagggtgttctggctgtgtttttagttgtttttattgattgctttcggggtatttgtgtactagaggtgtatgagcggcaagacgccctaggagctgcacctgcattgttggggttggattagctgttagctcccgagatcaggttgaggccggcattagatcatatccatatatattgtacatagttgtactatgcaaagaaaagaaaccgtgcataccaagagacaaggtcgttgaggcatctcactctgtacaatgtagtccgtacgtgacttcaaaacgccgacattgcgcgtttgggcctcctgcggggacagactcattgggatctgactgagaaccaggagcaaaccagccagacaccgatagagtggagaggctgcatattggaagatatcacagaccccttcgaggtgcatcatgcatgattatgataggctccgattcgatactgctcttctgggactcgtgcagcatcgagtcccgcttttaatctcttcttgcaatcagctctgcggggtaccaggtgttggggtctttgttgtagaaaggtttgatgttggagatgggtgaaaatgccgcatcggcaagaaatagccgcagaagccggtcttgaaaggctgtgaagaatatttccgtttcggggcactgagacgatgggatgatcaagacgataggatgatcaaggcaataggatgatcaaggcaataggatgatcaaggcaataggatgatcaaggcaataggatgatccctcggtggactatgcggttaggttggaaataatgcctgatattatgtcagggttcgtatcaaacaagattcttgtggctcgtacagctccttcctccgtaagggtatgtgtcctcctcccagactatatttctttatcgaaatggatgatttgatctgagttatgtactgagatattcctcagaggctatgtatgtcgtcaaaatacggtagctgtccttagttttctccacttaggaggctgttcgggtatctaggtatgtcggacaggccgtttagctcccaaggttgatctaaatgacccaagtttaggatctgatgcccacaaggtccttgatttacaaagaataaaagtggtcgagcagccgcatgtcattcactatggagttatgccatgacacgtatccctgaggaacaccaccgggagctacccaactcaaatatcctccgtctcacttcgacttccgtgctcatattccttgaaagattcgaaccatcatgcccatatgggtgatttatttcttctgaacgggggtcgggtcagctagacgtcatggaaggaagaatgagggcatatcacgtacggggcagttgcaggcgccggcagggcactggcaagaggagccgcagctgcatccgtgatcgcctatcatggtggtcagcattgaaggaaaaaaaatatggtgaagtacgatgagtgacaaccccgctatgaccccaccatttcggagatcaggcgcaaagcgcggttcttcacagatttctgaagtgacatataacatggaagatgaaagtgcttactcattttgtatgtttggggtggtaaaaactggtgaagcttttgaagttgtgttggttgtaaaggcgaggtgggggagagaagggaagaaggatggggccgggatcttatatactcgtgactttccgggatacgtcgagtctgagggtcaggcacctgagtgaattctcattcgcatctcgatccacgttacacttgagggcatatttctgtccccgcttacgcacatagccaacgcattgctttcgagagagtttgcgatcagattattccctcaaaccatgactactactcctatcgcttgcatctgcggaagcgtatctttatctatccagctagactctctcaccgaccattctaaactccaattatgccattgcaaccgctgtcggctggtgactgggcagttatcttcatcgtattatctcctccagcatgaaccacccaatctagatggcctccaggaataccaacagtccgaccacgtgagccactttttctgtaagacatgcggtgcccacgtcttcgctcgtatgcaccctgggggtcagtttctagttgcctccggcttgttagcaaagaatgttcccttggtccgagcggttgagcactggcaaagcagcgatactggtgacggtggactcagcgcactgcttcctagaacggagtctcctgtcacaggttgcagattacatatttcaaccaatatcgaaagccctaaccgagaatccacaaacccagcagaatatatatcaaccagccagcatttgcgggcacgttgcctctgtggaggggttgagttttatatcactaagcccgatgcatcgtccttacaagcctcctcgccatggccagatctcctggttccatactataccgggtctggggcaaatcctggcgatatcaaatggtggttgcgaagtggtggtacaaaatatattgcaggagcctgtgtttgcactagttgtcgactgagcagtggatttcccatccagacctgggcatttgttcccaaatccaacatctttaatgcagacggttcaccacttatgttcaatgtcgggaccatgcagcggcatagaagttcatctggggtatacagggaattctgcagccgctgtggggctactgccttttggcattgtgatgaacgaccactgctaattgatgtgagtgtgggcttgctccaggcacatggtgctagagctgaggactggttagaatgggtaacaaatcgtatcagctttgctgagatggcggtgcaacatgatttgattcatattctagaggatggcctcgagatacattcaaagcagaagtagagtcaatatccggacaaaaacctatgaatgccatcttagcaaccgtcttcacctaggtagtcataaagaagggaggttataggtatgcttcaagaaggcggtgatacatgcggtcgggcaattatgtctgttggcctgtttccttgtctgtacacgtggaaggtgcgaccaactccgtcaccgccttccctctgcctgactttttcggatatcttttttcgcgcgtcgaaactcgaaacacctgattctctttcctccacgcgtctgcatttttgctgcttaactgcagctgttcaaaatgccaatgccttcagttgctccgttccagttcaaaggaaattctaattatcgtggctcgcgtcctaatccacgacatgagttcactttccggtaccagaaacccgccacgtcggaccgaccattgttgtcttcgaagagggaaagcacaccggaacggcttgagggcgaaactaagcctgaactcaaatttgccgagctttctactttaagcgacagcgaagaggcagaaatggacatgtctgatgacgatgccgagcgaccacgcaagagacgtgcgctaggtgtcgatgggtccccagaaaccgctccggcacctgctgcccccaaatggtcgaaccccgatccttacactgtgctacctcctccggccgaaactacaaacaagagggtggatgttgtcaagctgattcgcaaggcgagacttgaagttgtcgcaaagacggacgagacggatgcagtcaagcagaactcagacttcatttctctcggcatggatttcgaaccagaagtttctcagagcaacgctcctgaaaacgcccccagagggccaaaggctcaggaaggtctagatcccgccattacgagtcggaagcgaacccgtgacgatgagctcaaaggattctcccgaaagaccggaaagcctgccagcaggttcaactacgatggttccgttattgatcaatggaaaccactttcccaagagacaggcacgccttggttcgagggcaccccagcatccttgcacgtgggaacccagtcagtactatcctttgcgctctttctcttttctctctaacatctaagctaggctgcataatgagattctcagcttctatcactgggccaagccacaggaattcgaacacatcgtccgtgcagatcttgtcaatcgattggagactgcattccaacaacgataccacaacgtttcaatccgggcctttggctcttttgcctcgggtctctatctccccacggctgatatcgatctggtgctgctctctcatacgttcttacgcacgggggttcgcacattcggggagaggaagggtcaaatttacgcgttttcggctttcctcaagagcacaaatctggccgttcctaactcgatcgaatgcattgcgtccgcccgggtaccgattctcaagtacgtggacaagctgaccggattacgagtggatttgtctttcgacaatgacagtggcttgattgccaacgagacattccagaaatggaaaacccaatatcccatgatgccagttctcctggccgtgattaagcagttcttgttgatccgcggcctcaatgaagtcccgaccggtggaataggaggtttcgctatcacttgcttggtgacgaatattctccagcatctgccccagggccatatgcagcctaacctaggaaccatcttgcttgatttcttgaatttctacgggaagcaattctcttataccacgatagcagtccggatggaccctccaggctatttcaccaaggtaagtggattttggttcgcattactgttgactagccagctgataatgtcaaacagcaatacttcggccaccccgatcgtctcacaatcgaagaccccaacaaccgagataacgacatctcaggtggcacgaaggaaattgggttgatcttgcgagcattttctaatgcccatactgccctaaagaatcgcatggaatatctagcacttgtccaaggatcgaacaagagcattcttgagcccatcattgcggcgaactttgatgaatatgtcgagcaacgcttccaactccgtcaggtgttcatggcagaggataggtttgctcgatacaggaagtcttcgcctccgcctccgccgccgggatcccctcctgctaatggagcatccccccctcctccccctcctatcgacggagccccctcttctttgccggcaccccaagctcgcaaacctgctaaaagactcaaggcaaagttgaagggcacaaaatcggagccagaagatatttcttcggatgacgcacccgggcccgaagcaaagtctgccaaagctcggaagggtgagacaagacgtcagttgtgtcaagagcgtgcggccagactcaaacgcctgaggcccgacctcaagaaacttcccaataccctcagcctccgccaagctcgccgccatgcaggctatgagaccgatgagcagatgaatgcggacttggatagcagagagcagaaacttctcgcctcggcataaatttgagtctccacttccacgcccgcaacgactttcttttggtttctgtttgtatgctttattttgtatgatgataccccttacttcgaatggtttggtgatttggtgatttgcacggggaagagaggagggatgtcagtggcggtatggtggggaaggtgatatgttcgtgtgtgctttggcaaacctgtatgcttattcttctcgttggcgagaagcgcagccaatgaccgcggagatcgagaatgagcattcttctttgggcctgagacgaaaaagtacttactatttaggattctctcccggacttcgacctcgccagattctgttgacttgtccctcggttgcaattgattagagctgtcctgatgttgaattcagttttcgatcttatttgattgagaactagtttgaatatggataagccttgacaatctcaaaccctggatgcccttgtttcatcatctattcgagtcgatccggcgccccaaacgtctaatgttctctcgggtttccctcgacgagtaactagttcttgcagttcttcggtccctacacgggatgctgttagtgatttcaatgaaacccccccgatgattatggattcgcgcccaacgtggatctatgtttgtcggcgtttatctttcttgcttttccctttgccctctccttctcatgccttccttctcacccagaaagcgctagatgcgacttcttggagaggaatagagcatcaggagctaccgggctcgggagcgcaggagcgcaggtcgaacttgcctttttgcaatcggaaggtgggcccatcccacgtgttgccgagtcccttcgtgcctgcaacttttcgtctttacccagaattatggaattacatattggagttacgaggaaacattgggagacgccgtaatggctgtatctcgatctattgcatttatcaggttctatctctgatcctatgcaagctgcttttccacgtctgacggtggtgtcagcataggatccgcctcaatagcggtatcggatatagagagagatggcttccgtccccttctctcctcggcctcgatcctctgcacagcagcaatatgctcctcggataacgaattcacaaagtctggcgatggactggcccagacataatcaacccactctgtgcctaagatatcttgaatttctcgtgccagctgcaagatatgaactccacgcgtacgagaccaagcacggtccgtgataaggtcctgctggggcgtgagtatattcgacgccgtgggcacatcccccgtcgggacctccaagctaggggtaaatggtccaggcgatttcaacttagcatcgaaatacgaggcgtcgtcatcctcattcaaattctcgagcccatcgacgatactgtgccacacgcgcaaagtctcctccagctcagcaatattactaacgcccataacgctgacgcctagccttctccccgtgcccaaattggccacagacaagaacccaggatcggcgtccgcagcccgagcaagcggcgcaccgagaccgccagcccgcgcaccaacacgcagccacgcctccagcgcaaaccgaatcgcaacaacctcaagcttctctccgtggcgcgaagcacaatccgcggcaatacggatagccttccgcagagcttcaggggcgggatggaaatcgcccatcgagccaataggcacgccgtcgcgacgaagcaatcccatccccagcggcgatgcgttcggaacgacatcaacgccagcagcaagtagcctgggtagggcatgcgagtgcagccgcgtattctgcagagtgaagttggcgtacgacatgacgatatcgagcggctcacccgtctcgcggagaaccgtctcggccagatcgctgagcgtgtcgaccgggtagccagagataccgacgtagcgtatcaccccctcttcatcgcggagacggcgcagctcctgcaccgcgacgacaacttccgcagccgtcacgaactccacgtcgtggcagtacactacgtccaggtagtctgtgtgtaggcgttgcaggctgcgtcgcacgctgtgtctaatccattgaggcgagtagtcgaatgaggagccggctatgcgcccgactttagtgaggaggtggtatgtctcccgtgggaagttggcttgcacggtttctgttgcgagggcgcggccgaggagttcttctgcggggccgtaatagggggatgtgtcgaaggcgcgcacaccgcgcgataatgcgcgctggacgagttctgttgttggaagcgcgtaagggtcggcattgtattgggagttaaaggttgcggtgcccattatcagcggaggcagcgccgcggacagtggggtggaggggcgcatggtgtgggttgggaggccaatttcgtcaatgccgaggggctggctatggaggcttgggtattgaagattggtcaattggtgagagtcttttcaaattgtaagtgtatcgactatattttctccagaaaaaaaaggaaccccccttcggctccgcttcggatggcgcaatggcgggggattccccccgaatcgggacatatggccacgatccgatcgatcggctttgcgttacatctactctttcgaaggtttcggttgcgtggattgaatgtccccttgatagaagtaggcagtgacaacgtgaaaatgtttctggcaaggcggcggtggcaaaaagggacaaaaaagtcaatgtagatcccgacaactacgatgcatgtatatgaatcaacaaatctagatcggacattacacacaagttaatgcaagtatatagctattgtacatgaatcctttccgagtgagagtggagaaaaggtcaacggaacgcggcgcatcacaaatgatatacatagaccgaaaggtcgatgagaaggtcggacatgaacaccttcatatccgaccggagatgacgcccgaggaaatccgggggccatcttaagacatcacagagaaagaccccaatctagaaaatcaaggcgtctttctctaacaacccaaacgccatgctatgccaaaaaaacgaaagacgagcagatcgaaaacaaagaagccggttggggccggaggcttctctcgcaggaagtatagatgtgctcgtagaaaagccgggggcccggggaaccggagaacgacgcttattgttgtgttcaattatctttgtagaccttggggttccatccttccttcaattccttgtcgtgcgcggctttgcgctcgacctcgcggaactccatttccagacgctcgcgtgcacgcagaatcttactttgcagatagaaactgccgcctttctcgggattgttcgtatcgaacagtttcttgaaccgagtcatgacatgttcgaggtcgtgttcgccggacgccgggggcttgacgttcaggattttgcaggcttcatcgatggtcacgctcgaggtggtagtagattttccggctgccttttgctgcccagcgtattttccggacgcctgggcttgtttgtaggcttcggcgaaggcgcggccgaagacccgggctccggtcacgacaacttgagagacgatgcggtgagcctagtagtttgttagatttaattttaagaatgggaagaataatgagatgaatgaacataccattgagaaagtgccgtggaggaggcgatcgcgatgttataggttgaagaaggaaagatgagaaggggaaaatttcggctgcgggttttagcgtccggagctccaggcacgggcatgagtatagggaacggtagtatagctagcgaggtcattctaattcgagattgaagattaaaaatgaagtatttattatttactatcatctacatagacatccattctaaaaaagattaaaaattagaacaaaaaatagaaatcaaaatccttcacaccgtatacgagagtcacatgtccacaagttcgatctccccgcagatcttcttagaccgaacatgatcctcactcatcctagacgatgagctcattgtcactctatgacctgtccataattggatggcagctttaggtatgctatttgatcatacctagccttaaacacggtccctgatgaaaaagaaaacagacaaccttccgtggatagactccatgtcgccctcatcgaacacccaagatcatggccagtcggactctcaaccgccgacggtcgctgccttctctccgtcgacgattaccggctcggctctgacctcgcgccagcgctccagtgtcatcgtacatcgaaaatcacctctcctagtggccacaccgccagctatcactcgagccttggcatactcgcacccgttcatacttcctctaaataaatttgttggtatcctgacatggacttctggagacccgtggcagagttttctgctggtatctaccttttggactatcgtgctatatggcgatactatcattctttgggcaggaccgatcctggtcgtggtcacgttgatcctcggcatgtatggacgtcgttactcgcctctgtcgtcaactgcatcaacaggcgaaaagcacaagaccaaggttgccccagatagctcactgcgtcatcagaagagtcttgatgaaatcgttgaaaccctccgtatcttcacaaccagatgcaatattctcctcgaacctctactcgacctcaccgacttcctatccacccaacgtactcccacatcggcgactacaaaacctgcgctgacagctctgttcatccgtatcctcttagtcacccctgtctggatcggtctgactctacctccattctacatactcaccacacgccgcgtcgtcatgaccgtcggcactattgttttgacctaccattcccgacccgccagggtgtcgcgtgtcattttgtggcggtctagagccgtgcgtcggctgtgtgccgcagctacgggcctctccgtcaccgataccccgagcagtccacaaaaggccccagctcaagccgaaggcgaaaagcaaggcttaaacatttcaacgcggcggcgtggaaacaatgccggtgtgcggttcacgtttgttgtctatgagaatcagcgccgctggctgggtatcgggtggacttactcgttgttccccgcagaacgtgatgcctggacagacgaacacatgaacgcagtgaatcccaaggattcctttgagttaccagaagttcaaacaggagatgccaaatggcgctgggtggagggaagtgaatggcgcatcgaaggagcggacaactttaatggaaaatcggactcgaaggggtcaaccggcgaaggatggatctactatgataacaaggttggtgctttctctctataccttttgtttattatcttctaacggaactctagtggaatgacggtcgccgcggtcaagacggatgggatcgctatacccgtcgacgcaagtggtaccgtgacgctgaattggcggacctatcacctcaagacacccagagttcctccgcagaaaccacttccgggctcacgcgggcactcgaaaaggagaaagaacagacgaacgacgacaacgccgacgcacaaagcatcgcgccatccacctcctccaaatctcaacgtcggcgctggttcagcggtacctatgacaaggaaatgacttcccctagcgggccgcccgctgacagtgggcgtgcaaatgcctcgcgacccatcagcatcaaaaatgcccgtaaattgtctcatgcccgcgaaggaagtgtgacaactagtgacagcgccagtttgcgcgagaaggagatagcgaattcgcaagatcatctcgaccggtggtcaactcgagctgcgggcgggacggaaagggccgaaagggaatgggggctgagcgatgaggtgaacatggggttgagttgatcgtgcgttctacactcatgtatgccatcatccttgctcgaattccgccattttctacctaaggcatggccttatatatccttatatattcttattgttctttgagcgtaaacggcggaattgtgaattgccttgtcaagttatatctttttgccccaatacgtaaacggtaatggacggaggacggagtagaggtgaggctatcgcaaggcttataggagcagtggacggtcaaaatttcacattccctcagattcaaggtgtgaaacgagggcaaggccactcatttagtataattaatgcaagatatgtacatcttgtctaatattaacaggattcaggaatagaggcacctccaagatccacgtccgggtctgttgcaaattccaactcaagagcaaaaaaccttgttcagatcgcataacggaattctgagttctcacggtctgttaggtccaaaaactcgtggttttccggaacgacgtaagcatcacccaatgcctccctctccttgtcgcgtcggcgattctcccgttgcgatatccaccagataatgcacaagtcgagcgtgacgatgaaatacaggatgcagatagagattttggccggcaaataccctggggcatctttggcttggaaggtctgtggcgagatgatgttgccgacagtataggcgatcgtctggatgcaggacacggtgatcttcttagttgagccagccacattggtactggtgagcccaagaatcgtcgtccatccgagtggaatgcctccggtgaggtagtatcccacaagcgccggcaccctgttggttgtcgccattaaaagcgaccccacgattcccacgatatgggctacaatgcaccagaacagtcgtcgttgtgtcttcattgccagatatgtcaggccaatcagaacgaccacctcataagcacccaggggtgttacaagcaggagactttccgttttcgagaagcccatgcccgttaccatgatattcccgaaactcgtggcaatggaattcggcacatttgccgccatgacccagaaggcgtagagccaggtgtgcgggtcggtaagggcttcgtaaaactgggcttttttgaagacattgcttccgatgccctgtccgttaccccgaagacgctccgcgtgcattgccttttcttccggggacaaaaagccggccgttaaaggggaatcgggcaggaggaagaagaaggagatgccggtcgctacggtcagcaggcccaagatcaggaaaatgacctgccaacctcgcagagacgcgcttggatccccaccgatgtgcgttgctacgccgtatgcgacgtagccgccgaacatctgcgcaaacccacacatggagaaccacaggccaacgcggaaggcctgttcctccttccggtaccactgcgaggtgaagactacccaggcaggtatgatggcggcttctgcggcgcccagaagcgtgcgacagaccatcagggaggcgaatgacttgcatgcggccatacaggccaggatggtgccccagatggtcacgttgacggcgacgtattttgccagggggaatgattgcatcacgcgcattgtagggaaggcgaacgccagctgaccgaaaaagaagatactcgacacccagttgaattggttgcccttgaggttcgttgactcgcgcatccccgtgacactggcataactgatggcaattttgtccagatactgcaggaagtacacgatgcagatcagtggcatgatatacatatcaatcttacgcaacagtcgtgcagatgctgcgggatcgagaacgctcggcgaaccgccttccagtaactgcaatgctccatcgcctgatgtagacttgacatggggggttttttcgtcgagtttgggcgagacgctctctgctggggaaattgttagagcggtcatcctgacggtagtagcgatgatatccaccaagtgggaattcacagaagagacttacgtttgccttaagtacctcgtaacggctggggatttggccaccaatatcgatgggctagcacgccatcaccctccgagctgtcacaataaatcctaacagttgcgatttttgggtcgtaagtgattttcttggccgtagtgggtactcgcaagcgaggataatttatctcaaccggagccccgagcttgaccggtgtcaaccccagcgatatagcaggttgacttatggagtaagagaattcaaattgaacatcgcagcatctcaccaggctagatatagcccaataagcattctaaaaggaaatgcttagtaaacaatatcattaacaggatccgttacacgtgggacccaccgaaaacaagggtctgatcccccggttacccactacgggtagggtcggatatccccggttcccaccccgtaagccgttctatacaaaaggtacataaacacagcataacattctcaaccatggaaccctcaaggtgtatacatctatagatacatgtgtatataagggttccattgaactacatgtactcctaagattggatatagatatagaaaacatacttgatatatatttcataacaatccgatattcgtatcattcatcccaacataaaccttggtccctagctcaataaatataaatacaagaagactaaaatctaaaccgccgtgactatctatgcaagaatcaactcccatcccagttcctccacaatatctaaccaatgcacatttctctgccgaccaatcccagtaaaccgagcttcagaattaacatcctgtctcgcccacaagatccccaataaatcctttgcacgcctaacattcccaatcccaaagttatcctgtagcttgcccaaggaacgaagcacaacctctctgtccgctacatcatcactctcacacccgcagataaagatagggaacgtgagcgccgagtactcgcagtggtcacccagcgggaaggtttcaatgcggccaagacagcggtagacagcgacatttttcggtgtggagatgagaggaagccagtcttgcgctgaaagagatgggacctcctctagctgggcgtttacaatggcaccagggctggcagcgggaggggtattaatgcgctccatgatcgagtggagatagacaaatcctgcgtcacggaagcattcagctacgagttgaagccgagttagggttgctgttggtgttccttgggggattgtgtagggaattgaagtgtgagaccaggcgaggagggattcgtttctgagatgggatgttagtgcggatgttcgactggactatttcttctgtaaccggagagagagagagagagacaaacatggatgcaacactgagtcgaagagccaacgtatcagcttggagagaaggcagctctgcgatacgggcacataaattgaggagttcctctgtatatccaatatagatatccaattttgggatgccgatatcactgtcgacaagaatatccgtagcagtgatacaattgcggttgctgattcggcccatgttataggcatacacgaatctagatgttgatatattatattagcgttcggtaatataccttgcagggtgtcatacatacagtccacgaaggaactcggctgcatctcgatccattgaagcgaatccaccgcgtgaaacgatcagacgttgcaatgcattgagatgaacaacccactgcttaacgctaccacgcacgatctcatatttgcacaatagaccgactgctagcatggcatcgtcagggaacatctccactgaacacttgtctagtgctgtgcggagtccattgagcgttccactataatatttgagtgcagctgtatgtgctccaagcccttgggagcgatttgctagatgaagagcagagatggcacatacagccttcatcagcagaggtgatgacattgccctggggatcaacaacgatcgaaggggattatcatggctttctagatttgctatcagtcgagatccctgctccatgtgatattggaggaagtgagtctcatgtgttgtgagatgactgatatatccttgaagctgtgggatcactgcgacagagttatgcaaatctatagtcgggctaggactgtattcttccgcatcttcaatcgaactggtagcttcctcatacgagacatatcctccaggagaaaatggaacggaccagctcaaggaagtccccggcccaggggataaacgagtctcaagccatgcgtccgatgatggggacggtgcaggcgaagggaactgagatggcgaggacgcactgagccgtcggcgttttgaagtttccgtctgtgagaatacctgcgccgatggacttagtggctccacccatatagagccgtagccctcgcatgcccggccttgcttgagacaattattgcaactgaccaaatcagttacgtaactaaatcaaattctaactaactagcacgcaccttggtttggttttatcacaggccttgcgcctctttttgcaggtgatgcatcccgagcgagtccatgccgtgccagattgccgtttcctaccctttttcggggcggaagtgggttggccgggtgtgaaggaagacgattgcgccgagctattcacaggaaaggcattcatagtgtcaaggggcgcctgggggatatggagatgctctaacaggtactattgacagcatgcttatcgcagatattagacaaattcagacatgcatgcgctgcgcagaggaagatagataataatgtatacggcagtgccctaggcgctgatttggtcacatgggcggtgtaccgacggtaacatctgccgccgccgaaaagccggcccggcacataactaatggggagtagggaacataggaaaaataggaaagtaagaaagaatataaaatttccgccctggtaaccggggttgtgtgaaagggagtaaggcctcgctgcgcgccatgtgctgtactgggacggtcgtgaggagacaagaagcaacaagaagaaagacatggcgaggcagacgacaaacaccaccactcctttggattaccctatggtctctgagccacgggggttttctggcaggctcttcgagacggaagcgactaacgggctcgtctgccgataatcttcaaccactcccggccacaacggcggacatgctcgtcttcgcaagcacgctgcttattagaaagcggaattaccgctcccccgcctaacgctagacttgcagcagaatcaccaggtatcaggaatcgtgatttttctacggagtagattccgtagtcattgtattcggtgtcacgtgctaggtcttgcaaagaagagtgcattcagttcaaaatgacgaagatagagacctaaagatgaagcaagtgaagaagcaagagatggactgctcatatagctggcgcttctgtaaaatttgcaaacaatctatggaataaaaaatagtaagcgaacgagcaaatgaacgaaaaagcaaacatgaagcatctgatagcgatctatagtagatcgtgacatccgggataccgtagtagtatcaaccatgataccatggcttcttgcttcatactcacttattacagtatcgaaaatgcggcattgtaccattgctacgtagtgatccatacgtaagagaagtatgtatcacttatcgatagcaaatcacactaaacctaatttggacaatttcacgccgaccccacaattgtggattagagatcatgtgactttgcgctttaattgatctcctcccatgctaggatcaatcagtgtagatcattgagatagttgaattaaattaaaatcaaatttgtcagttggtcgagtcttatcgctatgagtttaactccgtatctccatctttactccacgttgccctaatctatcagagccaagactcttcttctccaactgccctggtttttttacccaatcaggcaggtccagccacaccttatgtaacccgataagaggcccggggcagggcccctcaggtgcgagatatttcaatgtacaacattgggggtaaattctctcattggatacctttcttgccctctttccttgtcccctcccacttctctgtggattcgtgggatatttccactctaatacttcccatagccgcctcagatctctatttctgaagtgtaccagaacgccgccaaaatggtaaccaaccacggcccgcacccattcgacccaatcacaccggaggagatcaagctcgccgtacgcatccttgaggcggccttcccgggtgtctctctgcgctacaagcgaattgatgtcaatgaacctatcaagagagatgttatcgcatacatcgaagcagagcgtctacagcggccgctacccccacctccggcccgtctcctctatgtgctcttccaccgcctggacaccggcgcattctacaaggctatcctcaatgccgacaggcgcaccattgtctatgccaaggagcttcccaaggaggtccaagtacgcagagcccctctccctcacgatgcaagcaatgggttaatcaatatttccgctctatagggtcccattgacatcgatgaaattgccggaattgaagagttgtgcatgaagcatcccgccgtactagctgagatcgagaaattgcagctgcccccgggcatcactgtttgtaatgacccttggatgtatggcacagacaatgacaacgaggaccgacggctctttcaatgcttcatgtacatggtcgaagtggatcacccccagaacaatcactactctctgccttgcaaattctcacccgtgttcgacggtctcactcatgagttgatccgtatggattacctgcctggtggtgctgatttcgagactacctctacccagccttggaagcctgtcaaggcaatccagtacgctcacgacctcttggatgagccccttcgcaccgatctcaagccatatatcgtacaacagcccgagggcccttcttattcggtggatggcaactccgtctactggcagaagtggcgcttcagggtggggttcaacgctcgggaagggttgattatctacaacgttacatatgataacagaaacatcttgtaccgtttggccgtttctgagatgactgttccctatggaggtgagtcggattggagcctcatcacccctaacccccggtagatctgacgcacatgcatctagatcccagagccccctaccaccgcaagcaggcgtttgatgtcggtgacactggttttggtatgaatgccaatcagttggctcttggatgtgattgtctcggccatatcaagtattttgatggttaccgcaacgactccaaaggcaacccactgcacctgaagaacgtgatttgcatgcacgaacaggataacggcttgcagcataagcataccaactatcggaccggtgccgctaccgttgtgcgcaaccgccaattggttctacagatgatttgcactgtggccaactatgaatatatctttaactacatctttgaccaagccggcaatatcgaattagaagtccgggccaccggaatcctttccaccgttccattcgacaacgagaatgggcaaaccgtcccctggggtactaacgtcggtcctggtgttatggctcctttccaccagcacatgttctccctacggattgaccctgctattgatggatttaagaacaccatctattacgaggatagtgttcctatgccagaagatgagaataatccataccttgtgggctatacctccgagtctacggtgatgcacacggcaggcacagcaaacaccagcgtggatcgccaccgcgtcttcaagatccggaacgacaatattaccaacccaatcacttataagcctgttgcatacaagcttatggcagctcctagccaaatgcttttggtcaacaagaaggcccacggcttccgccgtgctgagtttgccaccaagccgatctgggtcacaaagtaccaggatgatgaactgtacgctgcaggcgagttcaccaaccaaagccgccgcgccgagggcgtcgaaacttgggtgcagcgcaaggacaacgtagagaacgaagacgtcgtcctttggcatagtaagcattccttcccacgacttgatctgtactgtataactaacaacccctgcagccttcggtcttacccacaatccccgcattgaagacttccccgtcatgccgatggagcgcattagtgtcatgctgaagcctgatggattcttcaacaaaaacccggctcttgacgtccctcaatcctcccagttgttcaacaaatcttcactctacccggaggagaagcctgctgcctgttgtgccggagcttcgtctgctggccccaaggccaagctgtacaagtgcattgactagctcgatttcttttgaacccatagataccccatacccccatcctacggttcaagcactattctttgttttttttttatgaatcggcttgatgactcctttgattttcttactacccttttcggttggccttaacgataccttatgatgtaaataccacctctataaacaccatgtttcgatcaatattttcctacatttaatgccaaatatatcgactgcaaggggagcaagatactagtaaaattgtggttatatctattgttgaattactttgcacgtgaactgatatatattgacaacggagtagtagataatagtgcacagaaaatagcagatggcctcatgtaaaaaaatctgtggaacgccgaaatgaaaatggacaagaaaatagatgtagagcacaagataaagaaaaggaggaagagatctcaatgtagatccaaaaacatatcgctaagatcatttcttcatatgatgactagcatgctgaaagcccgaaaccaatgatgttaccgacggcccgagtcagagctgtgaggaacatgactctcaaacaggtcctcaaggtatgcgctaggagcacgaccctgcggcgcttgattgaggttcaaggaactcgtcgaggcacccacataagagtggcgctggttatgcgaatcatggtagacaccaacaggaggcagagagggcgacgataggccagcagtgggcgagtaaagaggctctccatttggagcggggttggagccaccggcagcggcgtagtatccagcaggcaggtatgttgagccacgattccccgtatttcctgtagcgtgcggatttgcatgcgatccagtagggccgcctgctgtaggtgaaaagaaaagaccgctgcttgtgctcgagacccggttgggcttgtagcttgcgcgagtggcggtgccgagtttatcgagagatacgtcggccaccggggcgacggggtagggggttgatcgcttctttctgctgccgcgcaggaggcgcttggattgcgaagcgtgccttactgcggcgcgccgcactgagcgatttacggaccatgcgaccattgcgcgccacgcgagcagagtgaggccgatcagccctagcgcggcgccgacggcgatgaacactgtgccttctggagcactgctctctttcatatatggggcattggctatgggtggtatcgtcacaacagcgccggttgtggtggaggaggatgttgatgatttcgttgtcgtggagacggatgatgtagttgtactgctgtcggacgtcgtggaggaggaagaggaggatgtggtggttgtatccatggttgtacttgtcgaagaagaggacgtcgtactggtggtagaacttgacgtcgattgagaagtggttgaagaagtggttgtctcactcacgctagaagtgctttgagtggtcgaagggtcgtcggtggtcttagcggcatcagtatttgttgttgtatcgtccgctggtacggcagacacttgagcagcgatgacaatgaccagaaatagtagcagtagggatgacggcctggctgttccaagcctttgcggtagaactcgcatggcagcgtaaacaatcgatcagctgctccacaatgtgcgggtcagtaggcgccgatcccaacgacagcgaggaacaaagcagattattatcaatttaaatcagcgcatcaatgaaatccgtttggcaaatttaagatcgctgctggttccaacaatgactgcggtctctcgtgaaatattggtagatgcaggtcaggtcacggatcaacaatcaacgaatttccatatggggtgaggcgttgggaaactctcataaacgaatgactgttgttcaagtgaggccaagcagttccccgaaaatgactacaagaagagacctttctaaccgaaaagacgccaacgctaaaggagaggggtgccttaggcaaccctgagattgtcacctgacagtcaaaaaaagatacaaggacttgcgcatttacgttggcaaatctaacattcgaaaaactgggaggatatgagatatcatacatgggaatacaaggtaattgtccctgaacccccgataaaaaaaaaggaaatcaattgcagcaatgggtggaatccaaaaatataacccaacaaagcgctacaaatcactgcgctttcttttgcacagcagccgaggtgtccttctcaaatgcggcatagggaatctcgaggctgcttagagcaccgatgccaatatacaaaattgcgaggaacaggaaggtagccatgagtcccatgaagatgcctggagaagggtgagcatagtgaatagatagaaggtgggattgatagatacatacctggggtgaagtattgatattcttcgaagagagaggtggaattggccgactggctcgaggcgctgccttgcgcggagtagtcccgcttgagctccatgtggagggtgtcttggtacgaatctccagagatgtcgtagatgacggaatccgtctcggggaactccctcggtgaggtaatgtagagaatagtatacttagacgaggaaggaattcgatcggcgacatcggcaaggaaaccatctagcagagttagtgagaaacaagtgcataggcggactgcatacataccaaatccagaaagctgctgtgcgcggtcggaacctaacgatagcatggggaattcgacatcaataattcggggacccttctcgaagtatgaggggtacgatccagcttcacattgttagctctgacgtccttcgcgggttttgccaagttccgtcgttggccatcaaagcaacttacaggaagcgtcaacggcggtagtctgggccttacacttctcctccagaatgcttttgacatcattgggttgaaccaggccagcgacctcgttgatgctcatcttggaccggatcgagctgtctttcccgagcatcttcgcacctaagcggggtgccgactttcgcgtcgagaagtcggaactgtgcacaccaggctggtagacgacgacatagtaatctgacggacaggtactgagagatgaggaaaggttctcgaggagtgaagttcctgtctggatgtaggcggaattcgtcaagaccctaagggaggaccgattagttaaccgcagcgcgagagattcaatcaagcatactcagaagttgaggcgaggaagaatggcgaagtatctctgaaagcattcacggcagcagccccaagggccaatagcccgaaactgctgagatacattgtgtttggcgtggggatgggtcaagttggcgatgatgttgccaacgggaggtgtccgacttggcctcggaggcggtcgagaaccccgacccgcctgagctttccatatcaacttttttttttttggcttttgacgcagtttcaacacaacctacgatatacaaaggtctactctcgattcgatccaaatatacttgagattgggattttcattcaccatgggtcccaaggatttgaaaaagcgcaaaattgttgctgggccgaaagttgaagaggtcaatttcgacgacgaatcccgccatgaatacttgactgggtttcacaaacgcaaagtgcaacgggccaaacatgcgcaagacaatgccgccaagagatacaaagaggagaaaagagaagcaagaaaaaaggttcgataggcttcaatttgtgcccaaagacacccactaatttttctagattcgagaggatcgcaaaagagacttcgaacaggcaatggcggagcataaagcagtactcaagcgcatgaaagaagatgctggagatctcggcgcaatggaaggcgagaaagaggaggaagattgggagggaattgaagagcctccagcagtggactacgaagccgaatacgtcgacgaggacaaatacacaacagtcacggttgaagaaatggatgcatcccgtgagggtctgcttaaggctgccaggggggaggactcagaaaatgaagaagagaaaaaatatccggtcgagtcgacagaggatgacacaaaggccaagaagagaaagccccggagtgcagcctcagaagcagccaggaaaaagaagaggaatttccgctacgagaccaaggttgagcgcaagcaaacaatgttaaagcaaagggctgtgaaagcgaagagagcaaaggcgcgaaagggggcagaggaataagggaaccacatcttgaaagagatacgacatcacatgtgcatatactcggcttcaagcaattattcattagtcaattttacagatcataggcgtttgacatcatgggagatacaaggaagatgcaggaaatggtagacaccgcagtgcacgttgcatgataaaaaaaggtattgctatcaaaagcgctgtatccggtccatacacttgggaccagtgtaacacaaacagtcacagcatgaaaaagcagatgacaaaccagagaatgaagcttgtatccaaccatatgtttcccgatatcctgcacctatcaccggttcgagccagcttagatatcggccatctgggatgcaaggtcgtcaagctccttcttcacagtgctgtgttccttgatcgcatcctcgtatctttgctcgagcttggcgtgttggtcctcgagcgcctgcaccttccgctcgtagtgaccagccttgatatccgtttggcggagcctaagtgcccaatatgtcagtatgtaactgtgaaagaaccggcggctgatcgtacttctcattggtttcccgcagagtcttgtcgttctcctcggcctcctcctcaagaagctgcacccgtcgctgaagggcctcgttctgagtgtcgtgctggaggctctggctggcagcatccttagcctccttgagggcggcctctgtcttctcaacctcctcctctagaagctggttgcggtggttcagggatgtgatctcttgttcttttgacaaattctcctgttccaaggtcttgaccttggccttgagctcatcgacgagctcgtgagcctcatccgcctcagcgcgaagggcgaccatgcgctaaaataaataccgacacattagtaaaatattcagtggagaagtgatggaatgctggggtggtatgcatatatgcataggaggaggggctgtgtgattttgggaggcagtcaagctaccccgccggcaggggaaatgacttacctccttgatcttgtccattttaacggtattgaaagggagtaaggaagataatatgtatggttgaaaagaagagtagtttggctttcgctcagcgagaaaccgggcgagtgttggatgggtgtggaagatgatatggggagagttttgggagagaaggggaggaataaaggctgagcagggaacaagtagacagtactagcccaacacgtacgagctccactacaggggaagtaccggatacttactgtgtaccaacggcgtacccgtggtatggttaggtacacaatccgctctggctcgcagccaatcaccgcccaaggatcgacgcgtctccacgggcaaccacttgacaacacttccagggctgcatctagaactgtgctggctcttgattacactcaacacacttacgacacgacttggatttctttgatacggtgcatgagaaccaacagcttcagttggccaccatgttggctcttcgcgaccaggaaaacctggtaaatacccaccagaccgccgcggctgctaagcccttgaaccaaagcaagccgctggcacccaagacacccggcaaggcacgaaatgacgagaacaacccactggcatttggaaaccgcacggtgaagggcaatgggaaccgccaggataatgggaaaccgggcaacaacgcgttcatgactccaatgggtacgcgtgctgcgcgaaaatgacagatttgcaggtgacgttggataatgactgacttgtcttctcgcgtatagtgagggaccgagctcctctgggcatgaaaacgaccaatctcaaagccaacaacctccaaacccctgcgccctttgggggaaccaagcaaccgaggacaaaccgcagacagtcgactgcccagaagatcagaaaagctgccccagtgacacagcaggcccaagccaaagtccacatcgatgctgctgcagatgatgtaccggatattgagtacatgccgccgaagcctagaggtacgctaagcacaactagagctgcaacccaaaagcttatttctgacgagctatagatcttccggaccttccagacgatgtgacatatgacactacattcccccaattccaaccgaagaatcgagctctaggtttggagagtgtttacggaaagcaacaagtcggcagcgatggactcacggcgaaacaacgcaaattccaggaggattctgcggcgtgcgataggatggtgaatgacatgatcatgaaacaactcgacgacattggttttgagagctctggtgagaacgagtcgacaaagacacttgagccaaatgctatcccctcaaaaagacctacaaccaccacacgacacactcgcaatgtgtcgacgctccgagctcgtgatgctgtcgctgcgcttggcggatcccggccaactgttgcacctcgagtggccccaatcccaaagccacgggtggcatcgttggcatcgtcgctggttatgcccaagaggcatgccagagtcccgtctaacccatcttccatgcgcaatactgctgccgttgtcaactctcgtacgaccgttggctattccaaaggacgcaatgtgtcgtctaccctgcgtgataatcattcccaaacgcagaagccctcgagctcgcaggtcctgtctcccgaaacttatatgcaactgtatggcccccctccgctggactcggaaatgtggactcgttgcaatgctgctggatgtttcgatgccccggacgagatcacccaggaaccggaagaaccattgcccacgtttgacgaagatgatgaggcccagagcttccagctcactctgtaggggtacattgcgaaagatacttgacatcgacagggggattacaattttacttcagtatggttatgatttggcatgtggagatcgacattggctcatatggtgtaggggtttggcggcaagccgaaggatgccggcgttatggaatagtattaatgtacttgtaactggacaggttgcagcccttcaaccgcagaccaaattgtttcaggcgttctccactctcatgatgatcctttgccaagaggtagacaggcgagggtcgcacaccaaaacttgattaagtgtgaatcctcaatcactgttaatcgctgttgtgttcacacaatttttatgaatcggagaaacacactacccactagctacacggaccccataaatctctgcgacaatatttcacgtaccttagtggaattagtggaaaaaatagagcccaatggacgggagagtaaagtaaactcggtgtacctcgcgggtaccaggtccccagccaggccgcccgggtaacggcaagtaccaatcatgtacttccaggtacataccttgatctagcccacaccgccccggaattgcccataacttcttatttactctctggcctctccttttcctctcccattcctctcaattgacgcttcgccgccatgacgaccattcatccggactccaccgaggagttcgaatacatccagactccggctgcccccgcgcagaccaagcctgccttcgattgcggtgtcccgactaccctggtaagtgcattcctagagctatccgtgaccgatgtttggtgattccagggcctaatttgcttcatttccattcagtacccgactattaagaatgccccagttcctgccgactctcccggcagcgacagcttctccaatggcttgatgatcgctctggagatcatcgtgccctggtggctggctcgccaggttggtggaggtttctataccaccatcttctttgctctcttcacctcagttcccgtcctggtggcattctgggctgtctcttcctccgtttctcctcgcaagaccgagaaggccaagtactgtggccgccccgtcgagcactacctgcagttccacagcgagcacgatcgtgctacctaccacggcaagagcaagattcccatggaggtcttttatgagaagtacttcaatggtgaggttgacttcaagggcgatgctctggagtgcctcgagtaccgtcatgactgggccaacttcaagttcactactggtcttttcaagcatttcctgtttggtttcatccccgagatgctgatgcacactcgttctcagggtaagcgactcttcatgcagctctggtggcaattctaacattgtgtagatgaggagcaggtccgtgatcactacgacagaggtgacgacttctacgcttggttcctcggcccacgcatgatctacacctccggtgtgatcagcgatatcaacagggaggagaccctcgaggagctccaggacaacaagctggccattgtttgcgagaagattggtcttaagcccggtgaccgggtccttgatcttggctgcggctggggaacccttgctaaatacgcctcgacccactacggcgctcacgttaccggtatcactcttggccgtaatcaaaccgcgtggggtaacaatggtcttcgcaaggctggtatcgaagaggaccagagccgcattgtgtgcagtgactaccgcgacgctcctcgtattgagggtggatatcaacacatcacttgtctcgagatggccgagcacgtcggtgtccgccacttctccactttcttgtctcaggtttacgacatgctcgacgacaatggtactttcttcctgcagattgctggtctccgcaagtcctggcaatacgaggacctgatctggggtcttttcatgaacaaatacatcttccccggtgccgatgccagtactcctctcggttttgttgtcgaccacctcgagggcgctggctttgaagtcaaggctgttgacaccattggtgtgcactactctgctaccctctggcgctggtaccggaactggatgggcaaccgcgacaaggtcgaggccaagtacggaaagcgctggttccgcgtaagtttctctcaggattctcccagtggatctttctgaggtccatgcactttcttactaataatatctctaattagatctgggagtacttccttgcttcctccactatcacttcccgccagggtggtgccacctgctggcagcttacccttgttaagaacatcaactctacccaccgtattgagggtatcgctactcagttcggtcttgctggagctcgccagagcgccatcgaccgcgctggctcccttcccaaggcccacattgtcaagaaggacctttgaaggattgatgtacaatcatagccatcatctacttctccgagggtacatatcagtccccctcagactagtatgacgttacgtgaggcgcggcaatatgctgatgtgttctactgtgaacatattcaaacttataaccaagcatgtatgacatgagtgacatgacgcgaggtgaggtgaagctaggtgaaattgaattgcgtgagtggtcgtggaagaaaaaaggcaggagctggtagcgaaagaagcatggatagtcagaggtctatctggctggtccgcctggatatctacttcgatatttatctgtggtcgtgcgtctatttcttatgcctcaccctgtctaaggggaatatttgtacgaagtcaacgagtctgtctttgtcatgttattttttaagaagtcaatgactatttctttggaccgatacttgcagcatatcccttcgcttcttcgcttcgaatcagtaagattgctccactgagcccatttcacaggtgaccagttagagtttgtactaaggccatggagctcgcaagataatgcaacagaattctagggcgtcaactttctgctggcatcaaactctaattgtatcgtctaaaaaagtcgtgatatgtgtctataaaccgaattcgagtcttcaatcattaggttcgtcaatcaccaaaactttcataacaccaattagatttctcgacagctaagcgtcgagaagcaaaggaaaagaaacaaaagaccaggattgcgatccaataggataaatggtatatgtaaagagggaaacaaaggcaggatagatgcagacgtcagacccggttgaccctaggtaagtattggtacagtgaagagtaaacagaaatccagggaaatagaaattcatgcttgtcgcaggcccagagatccaatccaaggagtctaagaaagcatcgtgcatgaggttacacacatctagttgattgacctccaaaagaaaacaataggcgtacaagggcatgtggtgaggtgttccacacacgccgggtggaaaaaaagaaaaagaaaacaagagccaagctcagttctcatctaccgctgctctagcattggattgggtatatccggggttttggttagggcaaaagaagcccgaagactcgaccgttgtgttgggttgagagggagagtttttctgtgtcgcattctcgttccaaatcgcttgagatactgatcaaagacgaaaggtttaggtaaatttagtccgcgtcgaatttatggttgtattctccgagaaggacgtcatctgggcccgggccatgggtatttcgaactagtgcacagaagcgtgagtggaattgtccgaaaaccaggatagtggtgcatgggtcacacggctgggatcagggggagtgcggatgcacaggggggaacatactccattcagcttccgtccggaagaacacccacatccaacgtcgtacaacttcgaggaacatgagtatccataatccgctttcagtctccgaaatccagccgaggcctgggacaatgcgccatagccatgagaaacgaagcgccagatccgcgataatgacgtagtggtacatcttgtcagatccgaagtaacgatgccggcggagtccatatggatggctgctgtcgcgagattccgaggaaaatagagtcatatcccaatccttgacgacatcccaccagaaagagtagccggagttgataaaagagacgagaaacctgggggtattagagaaggcatagacacaacacatgagggatacaatcttacagaaggcgcatcatgctaacctcgctatatccacgtagctccaatggattgtagttgcgcattttggaggctatccaaatgaccgggaacgcacttgcatacttgagagcgttggccaagtgctggtttaacttgtgcgtctctctccgggtgactgtccgccgcgcacgataatattcagtcaaacactgacgaagacgaatcaagctaggaacagcgaggatgatcggaacgacgatttcacttccacaggcccggttgggcttggaagtagcggcgaagccatcggtgaagaacatgcagaagctgatatacagatctccgatcacgcgagcatagctagtgagggcatctgccagcagaatgtcaccaaacttgccatccttcgactcggccagaccgccaatactgatccgcttgagggtaaggagaaaacggattcgaccggagcgggaggcgcggttgaaaggccagatcagaataaggaggagaacgatgtacaccgactgcgggagccagtccagtcgctcaaccaattcaggggctcggcgagtgactacccaaaagacgatgaaccacagagcaagtgggatagtaaaacatgtggccaggcggtagacggcgatgtgatgtgggcgttgcgaggaggatgtgcgggcaggatatttgatgagcgccgggacgtcctggaagtatgggaatctgatcagccgtcgggaatacgctggctaggtgaggggcgtcactcacgatgttggcttttgccaagtattgaaggttgagtccccatccccagaaacctagctccttgtgttagcacactcgggaccgaacccgatcggacaggaatgtcacctaccagcgaccaagatagcagctatacgtagcggtaaagggaagatcagcccaaaggcatccaattgagcatgttgatcaactgccattattccattgatcaggggggggggaggcggggggagatcgcaggaggaataaagggttggagcagcaacaaagaccccttggatatgtaaccaaaaaggaatgactagaggtgagtcgacgtctttgaaagtccggaagttgagacttttccagtttgaagccgctcagggcagtttaataggcggagaggaggagaatacgcgcctggactagtcacagtccgcggatggtctggaaccccacagcgtcaaattgggtatataaaattagaactcattcgaagcacatcgggaggaagagcctgaagcgggcgatttttacgggatgtaactactgccagaataccaacgtatccatgtcatcatcggatcaaagggaagaggccaaagccatggacttgcgattcaaggcccctggatttcttcaggaaaaggggtaccgaggagagttaccaaatcaggtacattcagccactcgaaagcctcccgcattcgtctgccacaacgtccaacctttcagggccctgggaggttctggcggtggggaccaatgacgcttgcggcgtatggtcaccgtgttacggtaagttacgggtatttttgaaattatgtcattgaggtcatggggcagtcaagagggcacgtgacactgatctaaccataacgggaagtcagctgatgtcactctataccgaggcatcacatccgagggcaactccggggaaattgtgatctccaccaggtacgaacgtcggggaattgagcctgggactcgtcttggtagctataccaaccctctataacccgtcatggccgacgacgactcccatctctctctatcaaccccgaactcagccctcggctcctctacctctcacttctaccctttcgcaacctcaccagacatcatccgctcgcatgagaaggattcattccttacgggcagtctaattcaacaatctcaagggatcgttcgtgctctccgcggcgcccgatacgcccacacccactccgacgccatcaaacacctcacagaactcctctacttctccctaacaaccgccatcggcaaccgcaccctaggcgaagaatactgcgacctcgtacagctagaagatgacacacttcaattgccgtcaattggccgtcgcgtggggtacttcttaagcagcattctagtaccgtggacactgcagcggctactacctgcattgcgacagaggatccgcaacaagctcgagcgcaacattgcacgccaacagtcacgagcggcgcagcaggctggcctgctcaacaagccccagttctcaaccaccccgactaaacggccgttgtttacgaaactgcgcatccagcagtatgtccttgaacacctggactccatcacatccttgtcgcccatttatgcgctgagtattgccaccttctatttcacaggctcgtactaccacatctccaagcggatttggagccttcgttacgttttcacgaaaaagatcgacgacaatgagcagcgcatcggatatgaggttctgggtgtgttgcttgttctccaaatcgccgtgcagggattcctgcacgcccgcaaactcgccgcgagcatgaatgaagatgagagcgagtctacagacgctggtcagtctccctcgcagggtggagctgttctcgcttcgattcagaacccgtcctctattcctctccttcctgcgtctgtgcctctgtatgatctcgaggaggatcctggcgctgtctcatggattcccgagggtcagcagcggaagtgcaccctgtgtctggaaatgttcaaggaccctagtgttacaacctgtggacatgtcttttgctggatttgtgttcgggactgggttcgtgaaaagcccgagtgcccgctctgtcggcaagaggtcttgctatctaaggtgcttcctctaagagggtagctatgtggttagcaataagttataggctagtgctctcattatcatgactatcgctgaagagattagcgcagtcgatacatgtgtatacacttttttggacaaatatataccccctgtttctatttaatccgagcatggtttttatggactgtatggttcgattgaatcttgacatagatcacccaacatgcatttctacaacgtacatatagatcgagggcaggacacaaagcaccataacaaagggacgaaataaagaaagaaaaatgcctctctagatcgaaactgcacaaacatataatcttttaaaactttggcaaaataaaagagtgggatattgaagggataaataaatctaggtacatgtactcagtatgcatatatacatggtcaaatcagtgggtcctcttcgccgttgaccgctagtccaagtggaagaacaatgggttggttgagttcagcgaatgcgggacgaggtggcattgggtccatggcttgtcttttcgcttccatgatatggaacagacgaacgcaggcgtacggatcggtagcagcatctaaagaagaaaacaagattagcatccaaggagagagattgtgcaaatcgaagtactcacattgaacttgacgataactcaaattccgagtccaatcaccgcagcgcacatcgtcacttttctcgagagggagaccgaaatgctcgtttacttgctcgctgagattgacgcctctcttgttcaccaacttaggattgtctttgccgtatttgatcaacttgtacaaatgactgagctcgaaggtggctttggcatcaatgccgagatacttgcgcagccgtgtgcagtctgccttgatcgaaacacccactttaatgacgtcgggagattcaacgaggcgtctcaatgacggagaaactaggtcctccagagaacgtgcaggcttgaagagtgcaacctgaaagatggcgatacgttcctcgtttgctatttggatcaccgagacattgctctgaatgctgtcgaagcctgaggcttgagccttccattccatgtcgaatccaatgactttgctcccgaggaagtgttgcacggcttcttcggtgctttgaagggtccggcaataatgcacgatgagttttcggccatcggggctttgttgtgaattatgggtccagaactggggcgtcgtaagattgctggcactggaaccaatgtctgaagatggaattggctcagccgtggaatcattttgttcagcagatcctgatccgttcgtgggatcccggaccgaggacaaatgggtttcaagtggccgttcaaccagggaagtatcactggcaccactgctttgtcgaagctgtgcttggtggaaaattgcacccgtgctatactttctcccatcgtttggttctggtttagcgaatgttttcttcggaaacatcattggtcgtagtctgttacgtgtccttgtgcctgggaagtgagtgctggtttctcttggacctggcggacggaggtcatcaagacgtggctccgtgctgaggctcacgtctttactcttcggaggcataggccgtggcttgggaagaactcggctagaagccgcattgaccaggaacgggttggactcatgcgcgtcgaggctcctaaagtttctcttccgggatttgggtgatgacttgtaaatgacctgactgtcctggccgtcctgaccgtcctgatcggtaggcgcattgactaggaacggattgaactcatgcgcgtcgagactcctaaattttctcttccggggtttaggtgatgacttgtagatgacctgaccgtcctgaccggtaggcgcatcaattggcagtggtttgtattcaagatcatcctctgttgtttggccctcagtctttattgtcgacagatcaggaggcactccgtgttcaaggcggctctccccttgactgccttggtcagcagctgactcggctgcaccctcttgttcgattcccctcctcacctgcgttctccatttcaaggaactttccttgggtatcacaactggaccggacgtttgattgccctgattcgtaggcggagactcgatatggctcaacgatggccctttgatatatctttcgagacggctttgagataattcgatgaaagcggccttggcagattcggattcctctcgttccctacgtctggcctccattgtggaagaacctagctctaatatttgggagtttacgccaatgttgcgctcaatctcgtcgtggatgagctcccactccggccgcgttagtcggctggccatcaagggaatataagccccacaagcgagctggcccatgcgatcggtccatttcttgaaggcacgggtatcctgactcagtgggttgagcacttgaaactttccagcaagatagacacgttgtttcattgagcgtagcaatgattccgatcgaagacgcagccagtttagatgtatgtattcagacaccatctgtcgaagagcgctgcgatgtttctggaattctatacaccagtcggctatttttgaaacagtggaaaaccgagtctgcccagagaccctagtccacaattccccactatcacctctcaggctgtggtaaaggtaccaaacttcattttgaattccccatgtgacaacttcagtcatgagcagtggcgctattacatccaattgtcgccagtagatatgtagcttagggctgcgtggcggttttggcctccaaagctggttgtattcgaggtagatcttgttggatatcaggagtggactttcgtctaagtaccgagcctccggggagtccttcggggcacccagcgcaagtgcaagcaagacccgcctgtcagtagcttcaggagaacgtgcggacgaaactgccgtcatgaaatccctcaaattccatagttcactgtgtcgaagtggatgcgaagccatctgcctcctgagccaatatgcacggtggtgatgcgcacatttactaatttcgagataactatgctcaaggatttctttgtactggccaaacacccatttatcggttgcgcgaaggttcgagcgtgcttgaagggacgagcaaaggtccctgataggaaaaattcgtgtgttatcgctcttcagtcgtaactccacgtagttcttctgaatcagattgctttgatgaagaattctatcaatttgttttcttgcggtattccggggtcgtaggaaatccttgtcgagataatttttcaatcgatggatggacagctcggaaaggtgaaccagaggtgcaaggagtgtcttttgagacgtttgaagacacttctgccaactatggatcttctgggcggacattgccagttcgctttcccattctggagttctaccaaaaacaatacagcagaaaccatgatcaatcattcgacccgtcttctctgcttccgcgacagcagcctgtagtcgttccaatcccattatggaagatgaaagctctatcacttcggcgacatatttttgagtgatcttttctgcttgcagaactaaattcgtgttgtctgagaccatccttacaattctcgcggtgatggtacttgacaggctttccagttcagtcgcacattcttgggtggtcttttcagcatggagaacctgtttcgttatccgtgagaccacatcattgattcgattttgaaatgttgattcgagagctccatattcagcctcataggctagtatggccttgatagattcatcaagaagatcatcggcacgtttgtacttcagctggatataactcccaaccaattcctgataagaaggcagcgaattaagctccttctcaatgtgcagacgttgagagactcgggatttcccctctgctctcgatcggatcaagctgcctaagtctcgatgttggacagggcgcacaaaagcagaccggcctggaattcgttgtaccggttttgatacgggctttggctctggaacttcatcatcgtcatcccatatgccttctttgcgagtggtattgcagaagttccgcttggattgagaggccgtgggcggggcgtacgaggagcttgtattcggtaaagacacatgtcggagcctcgggacagatcgagcgcaagcactgtagtttagtcagaaaaatagccatcaaagctgaaaaggaaataaagtgtgcttactgctgacgctcgaaaagtcctaatcgcagtgacccataggatctggatccatcgatgtgactgctatgttttgcaatcgaagactgggtcttccgacttgctaaaagattcggccgcattggcataatgtgtgacaagcatagtggaccagcctggagccccacaaagcaattgaataaagtcgaattgattgacaaccagtggtaactcaaacgaaagtgcggctagaaaatcgagtgagggtcaggatatgtagtacttcatgttgcgcaaatcaactttcagagtttcctctaaaccatatttggattagtctctcgggtcggattatcaaaggtgccgagcgacaaacgatcacgtccttttctatatcgatcttgcccacgcggaatgctcgatcacctttgttttaaatcaagacgctttctaagaaaataattacgagcacattcattttctgtctcccaacatcatggcttctcagctacttccccttggtccgtgcctaatgacccaagaaagccatgaccccgctaactgatctgatagagctcattgataagtgtgttggctcccggatttgggttgtcatgaagggtgacaaaggtcagctaaaaatttaatggttgagcacgaaactgttctaatgcttatgaagagttctccggcactttgctcggattcgacgactacgtcagtgagtatccctgcataagaagtgacgatctcaccaggcactaatttcgatttagacatggttatggaagatgtgacagagttgtaagtggcttggcttttcgatttttagattcaagctacccttttcccttctgtggctgtgctgccttggctcctacgtctctgcgcagtgcgatttgcaaatttccgcgaaattctcgacaggtcattctgatgattgtgctctggactaacctcctctcagcgactacaccggtgctcaaatcaagctccctaagctcttgttgaatgggaacaatatctgcatggtaggttaaattcacccgaaggccatctggatgctatactaactcttccaccagttgattcccggtggtgaaggccccgcggcaagctcatgagctcgagatacccagtttttgccgtgacgaaaataaaactttgtgtattaatgataccgaatccaacgagatagaacaaagtcgttgaatgaatgaagctccatttcaagcgtgattttatctcaccccagtagcatgtggctcagtattgaagtaagacaggaataagctgttgtcaacaccaagagaatgtgttcttcgcctaaaagcatattcgttattatggctagtcacagcctaggcgtcttccggcgagagggtccagctgcaacctccaatgatatacgaaagcaagtatggagtatgcaggaactactctgtagcccacaaaagacctcgggacagtcagcggtagtcagcggcagccggcagccggcggtctaagataagctcgccaatcagaagtcgtctctacccgagaccagggtatcgacggctaacctcgggcgccgcgcgctccggctattaacaatattggaagcatctcatcgatacgagtaaaggccgtttgccgcgtgctgatcggacaattctttggtggatatcatggtggatgtagagacgcaattgttttgactactccacatttaacgtgttcgatggctatgttgtagtcagttgactgctgttaagtggaaattaatgatggagaaccttaacgagcaggtgattaggatgtgatcatttagagtacattattcaatgaataatatatattatagacctgcctattcggtagatccagacatgttgtagactggccgaatagtagtgccatgccgtagagctcactttcgagagtcagctctgactcacgataatacacgccgtacgtgatgtgatctttcaatggccaatctaaagtaaataagctgccaggaccttggaaaagtggcacttggccagggacaggaaaaggggtcgcggtgcacacgggatgtcagggggctgcaggtgcagtatcagccgtctgcggataatcatggatattcgttgagtattcaccttcaataccccaaattctatcattctgaagatctcggtgctgtttcattgtgctgtctttccccagactccaaagttgactagtcaacaagttatgtggaaactgttacctaacagattgtcatccccgcattttatatgcacctaatgttgacttcgtatttacgacaaggcctgtttattctggtcatgttcaacatgacggtttttgagctgggtctaaactattggataccgagcgcctcatggacttgaatgggaacttccgacttggctgtcgggaaatatgaagatgccgagaaggaatattagaacaaatgtatggagtacaatattggatgtatattgtgtctttgtccattccgtggcggtggcgaaaatcccaatgcgcattgcgtgctgtttggcccgggctggacttatttatggggaatttcgtcggcttgaataacctcaagtgtgaaatgttcggagtactccgaggataatatagacattttgcggggtattacccgtgacttctgttgctcaaccttggaacttgacgaacagccttagaaaggtccacgcgtggccaggtgtgtctaagggggagtgtagatttaaccgattccacatgagcacctacctatgtaggcaatgttgtaccataacccgggcgcagccgctgacctttcaacagtcagacttggctctatcatctatgttgtagtcaccggaacacaaataactagtcatcaatcctgcccgatgctactgtggctgtcttgttgcgggagcgtggccagtaaaatcagctactgcgcgccatcagctcggaaaggcttgggtggctgatagtcaagcatagactcaatccagctcaggccgaagacggtgcgcctttttctcgcccccccttatggtctgaccgcgttgcatggaccaaaccttggaagtcgtaaaattccctatctcagaaaatggtgatgcgcttgacccgcaatgcggacatgcaagataagactggtgggcccgtttacacatttcaatttggccacaatgagcttctctcgagtttacagtcacacgattgtgaacaccttgagatcttgcgttagccatgattaatgattaatgtgattaatgtttcctggacggacatgtccgaatccagcggatgggccacaaaagtctattggcggacctagggcatcctgatcaaggtgttgtgaaaattggccagtgataatacgagggtcttgctgaacacgccgacaccaggccaatcattaagtctatgttgtataatgaacctcctagcacacactcttggctttttgggaggcttctcccgtgcttccatgcatatcacaaaccgccacagccacgtaaaaaccttcgcgtcgaaaacgccgacgcatagagtttgcctacagggtctcgtggcgccatccctcatccccaccagagctcatgccagtctctagtagcgaacccgaccgaggcggtttcaaatgtccgcaatcaatcgtctgcctttctgcgcacatacaacacacacacacaggccaagaggctataccgaggcgacgggcaggaaaactcaattgaggcaagtttgcgaacaagcctcagtggggcgaattcctcgtccatatggcattgcacgcatatccctgtagcccatagcgcatgccacaggaacggggtccgtcgggaagccttcccataggcaagggatgaacgacgagaggaattcccctgccgtccactggtcagcacagtagtgtgagtatgtttcttcccaagtaaggttatctcgttccaaacttagaatgtcggttctgcgagataaaggtcttctagaaggacgagaagcggaaaccttggaactcgcggacactatggaggactcgttccaaggttcaaaggttgccccggtggaggtccgggggaaagggatgtgcccaggtgtgctcttatctcccgaggtttctctgattgggcaacgatcgactatcgtccacgggtagagtgcggagagactgacagatggggcttagtggatctggggagttgcctctttcgggctccagaagcttggcttttccctgtccacctacagaatattaaccagatgaagtcgttcaagggttgttagtatgactgcatggattcagtagtcatgtactacgagtcaggtcatggcgatagtcaagctagggaggtgtagatattagacatccatgaggtagatcctcccgtcccgttatgacagtctaaatcacgcgagagatagataagtagtggcgctaccggggttccacctgcaataattactatttcgcttttaccttttttacctttttgctctaaaacaataagatagtcgggtgaaacactaggtatggagcttccacctcaggatcaagcgggcttatcttaggaacttgaacttgaccgtttgcagccttgcaagggtatctcactgcatatgtatgaatcatgatcaggatcgtgtgtaactcatagcctcgcagaacactgagtaaggagtacaaatgcatcataaatcttaattaaaaagataaattgcctagtcgcggactcgggacccagagcatgccaaggttatcagaagattaaatgctgttagtgcggaactctagatggtctaagcgcatgaaagcagatagatttaggtgcttttgatttaatttgattcgatttgattatatggaacgtaaaaataattccatcgcttttatctgaaatcggactggttgtatttataccctcccccccctcccaaacggccaaccctctacttgtttcacctctgtgtcggttcattgaccttaactcccacagaaccttcggcttcagcgaacagatacttatttctgtcctgaaaaatacccactccagaagagaaaaatttcacattctcaccatggatgagaagaagtttgaggagcacaccgtccagactggatcggatgctcccccatcctatggcgactcatctccaacgcgaggaggcatgggccaacgaatcattgacagcttcaagagagaccccaaccacactgtcctcggtactcctggagctgatggcactgccatggatgtcgaggctgccgccgcccataacactgcccactcaccactgcagcgacacttgaagggtcgtcatctgcagatgattgccatcggtggttctatcggtatgttctgcgctgattcgtctccatcctattcggtctcgctaattacatttactatgtaggtactggtcttttcgttggttccggatctgttttggccgtcggtggtccagcctcagtactgatcgcttatattttgatcggatgcatgctttactgtacagttcacgccttgggcgaaatggctgttcttttccccgttgccggttctttcgcccactattcgactcgtttcatggatcctgcttggggtttcgctatgggctggaattacgctcttcagtggctcattgtcctacccttggagattgtcgctgcttccatcacagtcgattattggagcccaggtgtttcaaacgctgcctgggtaaccatcttctgggttgtgattgtctcaatcaacatgttcggtgtacgaggatatggtgaagccgaattcgtcttctccatcatcaaggtcgttgccgtgcttggtttcatgtaagctacattgctgtttggcgaaacttgaacgtctaactgacttgactattagtatcctaggaatcatcctcaactgcggtggtggacccgaaggtggatacattggtgccaggtactggtacgacccaggtgcattcaggaacggtttcaagggtctctgcagtgtcttcgtcaatgctgctttcgccttcgctggaaccgaacttgttggtcttgccgccgccgagaccgccaatcctcgcaagtccctcccgactgccgttaagcaggtcttctggcgtattgctctcttctacgtggtttcccttaccctcgtcggccttctggtgagatacgacgacccgaaactgatcagcggttcctcctccgccgacgccaaggcctctcctttcgtcattgccattgagaacgcaggaatcaaggctctgccttccatcatgaacgttgtgatcatgattgcggtcctctctgtcggtaactcctccgtttacggttcctcgcgtactcttgctgcccttgccgagcaaggccaagcccccaagttcctcgcctacatcgaccgcaagggtcgtcctctacctgccattattattgcgtctgccttgggtctgctctgctacctcgccgcctccgatgtgcagacgactgccttcgaatggatgatggccatctcgggtctgtcatctatcttcacctggggttccatctgtgcttcccacatcctcttccgtcgcgcgtggaagaaacagggccacaccttggatgagcttgcattccgttcccagcccggtgtcattggctcgtgggtcggtcttaccttcaacattctcgtgctgattgcccagttctgggttggtttcgcccccattggttacggagaaatgacatctcaggagattgcctacaatttcttctccgtctacttggccgctcccgtggttctggtttcttacgtcggttacaagatctattacaggtgcaagtttgtgaaatccttagaggtggatttggacaccggtcgtcgcgatcttgatgtccagcatttggttgagcaggaattggccgagcaaaaagaatggcccaagtggaagaaggtttacaagttcttctgttaagcggatgttttatcttttttttctttcgacatccccccttatgtactacatctttacgataccataattgcgctatgaatatcatacgaaacgttcatacattccaaagggcataccctatttttaacaatttccaagacactactccgtactccatagcacgtactataatctcgagcctccaggcttggcatatctgtggggaagcgtttagactcagtagtcaagtcaggcatctgggcataacaaggctgacaacataggggtagggtagttatacatagtactattgcactccagggctatacatctgtattttctaatacattttgattgaatgtatagttattattagcctacccggctcacagccacaatgcaaagtcaatgcgcaattcaattgtaaacaaaaaatagacaagacactcctccccctcccccttttttttctctcagcatgaaaaaaacagccaaatttaaagatttgcagcaaattaccaccccggcgtaattttcaacccaaaaatagcccaaagtggatgcaaagacggtggggagaggtcgggttgtcagccaaaaggacgcttgttaggcggtaatggtctgagatgtacgcaaatccccgtaatattacgagccacatgtgacgccctacgatctggaaatccatgaactccatcaaactccatctctatctccatcttcatcgttcccattcggtctttctttgtttttgttgccagcttcctgacgacttgcatcgcaattcgcttggcctggctttcgctcattttagcttcgaattcatccgcgatatcggcgcctaacaccctgcgcactctattctcacgcattccaaagcgatcgtctctgcttcgtcattggtgtttcggtctatgcgcagctccgtcccgtgtcaagactggacattgaattcaaaaccaagtcaactggtcctccctcggtgaccttgatcatatcgcaaactcagagcctcatcgactccgattgactctccgtttcgcgcttactccgcccttttacgattcgcgttttcctccgaacatacgaactcatcgctgtcagctgccgggtcgctttcccttcttacgccgatcataacgtgtctccgcctgacggtctgaatcagccttttagccgtccgtcataatgcctggtttcgcggactctttctggacccccgactatgcttcgggcttgggggtgctatacgggaagctgcagcagggagttgtggaaaacaaacaaattttggccattgcatccatgcgttcagatgcagaagagcagtatggactccgcatgggagacattgccccgagcgtggataagatgacggcgctgggattcggcaaggacgatggtgccagtgtcagaaaggtttgtttcagacgcatagagaccggagtgaagaaagactgacgtcgcgcgatcctcgttacaggcatacgaaggaatccgtaccgaaatggtcgaggcctccaagaaccaccagaagatcgccaacaatatccgcgaattggtcgtgtcgcccttccggcgttggagcgaccaacacgaaatgcgtgttcagtattcgcatgacgcgctccagggccgcatcaaggaacacaccaagcaggccgaactggtaaggaaactgcgcagcacttacttcaacaagtgtcgtgtggttgaggacctggaagaagagaacaaacttgctttccaagatcccgagacgagtcccaagatcaaggtgcccccgaagatcgttctccctgccgaggaagagcccgacgaagaccccatcgagttgggtgagcggatattcccaccagaccacatcaaaaaacttctcacccatatgcttgataacatcaagcttggcgaggcgaaggttcccattatcggcacttatcagaatgtatccacgggcgcggatattgcgcaatatattcaaacctacatggaggctgagaatctcactcaagtggagataattggtcaggatatggtagacaacggtcttctccgcttggttggaaatatgggcaatgtctttgccaatagctccaagatgaactaccagtggcgccccaaggttttccaactcaccggtatcccagaaaaaaagaagcctctcatgcgtgtcacctcagtggcgtcaagcgaggacggcaacggcagcgactcacctattgcatctgtctccgagatgctgtctggctggaatcccctcaacaacccttacccgaacgagacaccttcggagaagctccgaagggaggctttggaagctgatgaacggtacaaggttgccgttcgtaagcttgaccagatccgctgccggctggaggaagaagtcattggccagctcaaatacatggaacagtgcgagctagaccgtctcaaggccatcaaagccgtggttcttgacttctcgggtgcgatcagcaatgtcattcccaacctgcagagcacagtggatcatatgatgctataccaggaaacaatccagcccctaggcgacttgagatacctgctagagaactaccgcacaggtggattcgtacctaagatccaagcatacgagaactactatggttccgttgaaggtatagccttggtcattgcccagagatgaaaagttactaattttaacaccaccagaacaaaactttggtgtcgaccttgaagctagagcccgtgctgaccgcaaacgtgttccaatcctggtgaccaccattctgacctatctcgataaccgtaaggaattcatgacatacattcagattctggaccacgctcacaaatcttgcaggctaccctgaacttgaaggcgatgaagcacgacgaatgatctggttgaccgaagttgatttgggcacgacgcacaagcttcgtcaaattttgaacaacagcaaagccgattatgccgaggtgttgcctcaattcggaattccagttattgcaagcgttctaagattgtaccttcttgaattgccaggttcgttgctctcttggtggcttgatatatccttatgctaatccccggatagactcattggtttcctcgcaagtttacgagatcgtgaaaacgatttattcgaccactgctcatgagaccacggaagaagggcggatcaaggttctccaaagtacccttgggcaactccgccttgtcaatatcgctacgcttgatgccattatgactcatttcacgcgcctgattgatttgacctcggccgacgaagaatacatcactttgttggcacaggccttttctccttgcattctccgccctcgcatagagagcagtctcactatgaacgagcgccacagctaccgtctgatccgtgatctgtttgctcacaaggactccatatttggcgaactgaaacgccaatcgagtgcgctcggaatgaccagttcctcctccaaccgtccacgggccatcagcacggacgagagtaatcgtcgtgcggcgacggaggcccgccagcgagctattgtcaaccgcagccgggcaaccagtcctgtcaatcgccaacggcatcgacgtgaccgctcgagtggtgcttccgagataggtcggttcccgatcaacgtcagtagcccttcagatcgcagatctacccgcggcagtcttgatgtaccgcccaacaaggctctccaggccgaacctgaggatgctcctaccgtgaacacccaagttgccgagactattaccaacggcacctataccgagtctccttcttcagctgttgccagcagcagcacccactcgagctccccaagccctcctcctgttcctttcgaggacgcagcctccgatgactccccaactcctactcctactccggctgcaacatccgccgagtttgagaagcgcaattcgatgtcccgctcttctgtcgctcgatccagccgcaagccaggccttggtagcttgtccagcttccccactggctcggctgtcggggccagggggnnnnnnnnnnnnnnnnnnnnnnnnnnnnnnnnnnnnnnnnnnnnnnnnnnnnnnnnnnnnnnnnnnnnnnnnnnnnnnnnnnnnnnnnnnnnnnnnnnnnnnnnnnnnnnnnnncggggcgcggctgtcggggccagtggcacagagagcaatcgaagcagcattgccgaaagtgaacccaaccgagtcactctggaggacaagcctatggacgactagttctgaggatctgtggatgcggaggaaaccttgtacagatcagactgggagcagtatatcgtgctgggaggaaacatgcgttattgcatcacattccacccacatctttgttgctccctgatcatggcggagacgacttggcgagtgacaatttggaacgttacctttatcttttcttgtcttttgtttctccttttgaacttgaacttttactgcatgcctcttaagcatgcatgcatacataccctgtcccttctgctatgttaccgcagaagggattgttcatctcccttttaccttgcctatgttactgctgctgtgtttttgccccttatgtttcctgatgcattcccttttttgccctcgtggtgttatccacttggtgtatgtatacctcctttttcgtgcatatgaatttctttctgtcctatatatagtactactctaacggtgtagttctgtagaatttacatggaattcaatagctaaaaagcgttttcatcttctaatctctttatgcctgaaattactgtctccactaaagtctggtctggattcggggcaagaaccaccgagctttagctctcattgacttggattttaacattctcccgaaatattactttagtctatgaacgtcttgaaaacaaccccagaatcagacagcaaaagtactttgtacgaataaccagccccgcatatcttccaagcatctacaacttgacttccacgataggatattccaagccaagcgcaacaagagaaagaacacaaaacaaaacaccgaaacacaaaacaaccccaagccatgctaccaaatagccaaatcccaatcgtggactcccacatccacctcttcccagaaacgcacctaaagaccctatcctggcacaataccaacaacccactcggcacacaacacagcgtaaacgaatatcgacacgcagtaacacaagccaacgccacacccgccctccgaggcttcatattcctagaaacagaccgactatcctccatcaccgactcaaccaagccacccaacaacggctggcaacacgccctggatgaagtctccctcctaacccgcatagccctcggcacaccaatcccaggcgagggccacgtcccgcacgacaaaacgctctgtctggggattgtgccgtgggcgcctgtgcccggcggaccggatgtgctgagcgcgtacatggagcaggtccgccgccgcactggggaggaggtttgggggaaggttaggggagttcggtatttggtgcaggataaggctgaggggatgatgctggagaacgggtttgttgctgggttgaggtggttggggagggaagggtttgtttttgatcttggggttgatgctaggtctggtgggttgggacagttgagggaggcggttgagatgatggggttggtttatggggggttggaggggggggatggggnnnnnnnnnnnnnnnnnnnnnnnnnnnnnnnnnnnnnnnnnnnnnnnnnnnnnnnnnnnnnnnnnnnnnnnnnnnnnnnnnnnnnnnnnnnnnnnnnnnnnnnnnnnnnnnnnnnnnnnnnnnnnnnnnnnnnnnnnnnnnnnnnnnnnnnnnnnnnnnnnnnnnnnnnnnnnnnnnnnnnnnnnnnnnnnnnnnnnnnnnnnnnnnnnnnnnnnnnnnnnnnttggggggtgggaggggggtgatggggttacgattgttattagtaggtttctttttctcggttgggattcttcttgctgactgctatagaccatttgtgcaagcctaaccttcgtttggagtcggatgatattcgctctcatccggagttccttgagtggaaggatcttgtgactgagatggcgagggcgagttctaggacttatatgaagctttctggggctttttcggagcttctaccgctacaggcggagtcagaaccggatttcgaggcaattgttgaacgtgtgcagccgtggacggatgttatttttgacgctttcggggccgatcgtgttatgtttggatcggattggccggtgtgcaatattggcggtggtgggaatgatgtctcttggggtcgatggagacgtgtggtggaaaaggtcttggaacggcgaggattatcgggggaacaaaagagaggtgtatggggatctgttgctttgcatgcctatggtatagagatctaggtataaaatatgaaatgcaaagccatttgctcggacttccaagaaaaataaacaactatatatatcctcattgcaggttaacaaataacccaccatcaaccagtagctgcgcaccagtcacatagccactcaattcctcacaagccaagaaaacagcgggcccagccaaatcccgtggttgacccagtctgcccagcggaattcgaccttccatataactccgcttaacagggtccttcatatcctcctcattaagctgcgtccggatagtccccggcagcagcgcattacaccgaatgccgtacttaccgagcgcacacgcacatgactgcataagactcaacacgccggccttggtgggggtgtaatgtgtctgctgggcaccgccgaccagagcggagatggagctcacgccgatgatggacccgcccgatggtgactgggccagtgccatttggcgggctgcagcttgggtggcgtagaatgcgccagagaggttcgtggagagtgtgtggttcaagagggaaggttcgagtctagcggggtcgttagagaggagaagaagagtgaattgtaaatcgataaatctcactctaggaattcagcgaaccgacacacgcctgcattgctcacgaatacatctagccgaccgaatgcctcgacggtttttgcgacaaagttctggcctgtctctggctgcgaaatgtcgccggataccgtgaggaagcgggtcttggctgcttcggcttcgatctcgttcacgtctttgcgtagtgcttctagcagcgcgtcttcttttgcgccgccgaggtggctgatggagactttggctccgtgacggatgtaatcaagagcgattgcctgtaattgagttagtgtgtttttcttgttttcctgaatccaaatgagaaatcatacccgtccgatgcctgtgaggccaccagtgatggcggcgactttgccaactagtaattgtgggaaagtcattgaagatgttgagaatggacattgatcattcacaactctcccaattctcccattctcacttgggccgaatacgtgatttctcgagctcgggatttcgtggtgatgttaccccgagtgtggggaaaccccgcagtgtatccggctacgaagtacatttcctctttccagtagaataatgactagctagcaagtgtcgaaagcattatcgacccttggcccttggaagcttccttgttacgatttatacaggaagatttggagttttgacatgaaacgaaagagttcaactcggctcgttctcgcttgtgtatcgcaacgcgaaaaacacagaaaatcctgtacaatataatgataataagtataggaagggacatgagatgggatttcaaggatcctaaactccgatgtgtatgtacatggctctcgtatagtgtgtaagtaacttataaacatgaaatatatcacaaagaaaagaagcgaagaaacccctcaaaccatcaatattacgtagagccattggccaactcctcgttgtcgggtgcgcgtagggacttctgaggcgctggcgtaaggatagcggcagcagggatcaggggagcagcaggattgagctccagaccaaacccgggcttgtccaagatcgagacgtcaagatatcccttagtaggaatgggctcgttcaagaaaaggttaccaaacacaggctcgacagtgtggccatcggcagagttggcaaggtactcctggaaggggctattggactgggagacgacaaagtggtacgagtagggaccagatgcgtggggcacaacaggaagatcgtaagcagcagccatggcagcgaccttcagcagctcggtcattccaccaacccacatcacatcgggctggaggatgtcaacgttgcggccctcaatcagcttgcggaagccgtagcgggagtactcgtgctcgccggtggtaaacttgacagtggggtgggcacgcttgagaagcgcgtggccgtcgaagtcatcgggtgaaagacactcctcccaccagtcaatatcgagtccaatagcctcgcagcgcttgactagctggattgtgtaggggacgttcaaggacatgtagcagtccacgcggagtgggaagtcggcaccaactttctcgcgctgctgacgcaggtattcaacgttcttcaaaaggccctcagtaccctcgtcaggaccgtgtggcaatgccaccttggcgccgatgaacccggcagcctttgcggagccaggttggggaccggtgcagtaaaagtccagtcgggttcgagtagcacccccaatcagcttgtagacgggctctttgcggatcttgccctgcaaatcccacagagccaggtcaatgaccgagatcacggcgacgggcagacccttgcggccgtagaacatcgaggcgcggtacatcttctcaaagaggtcgttggtgtcgcgggggtctattagaaatatagttcgtcagaaagatccattgttatatgtatgtgagatggtgtacatacccgcgccaaccaggaagcggttaaaatgttgctgggtcagccagcatgcaggcgggcctccgaaaccagttgcaaagcccttggttccatcagtggcctcaatctccacacagaaagatcctaaaacattgattccccatgatgttcgcgaaccacggaattgtgcccacttgctcataggggtagcgatattgctgtcgaccagccagtggcctcccttgacctgtattgatagttagaatgttaaatttcaaaacaattgacatctcagagctcgtacattgtggtaatcaccgccagagccaacaccatcaatgatgaaggtgcggacttccttaatgcggggaaattccgttgttgaacccatgacgtatgaaatgaacaagtctaacgaaagaacccaataattgtttagacgaaaagataaagaaagaaaagcagagatccaacaattgcgggggggttcacgtctatttcaacgaattccagaagccgaggccagctcggggcattgctaacccgagagacggacaaacggcgactcggacaattttgtgacaacacatgtttggttgatttatgtcaggctatgtggagtggataaaaatgctcttgaggtcctacttcttgaagttcccgtctaaccattgtgtcaacgacagaaaacagcttgatctccgagccttgcgtccttcaaagcccgtatggctcttcaaaatcattgtaagaatctggagatctagaaatatgtcgctgcggccgctattggtaggtagttgacctgagtgccataggcctcacgggatgatctaaatcattcaagggcgtagttttaagacgtcgttgtaacagactgtaggtccttaagcagtctactcggagctggcggatttctaaagtagtatgctgacaatattggtagtaagtgtcatgaagagatagtagctgtcgatattcaattggatgaaattcgcttgatatgtacgtagcgagggtataggattcggagccacttttatgttgtatgtctgtataatgcccggttaagctaatgaataagatcgaaggcaaaagtaccaacgcccatttagatacagagctcacgggttgttttaagcaatagctatatggtaaactagtgactatggtagtaagacttgcaactctccttgactagggatttcggttgaactctttacgcactccccttttccagtataaaaaatgggaagatacggttacaaataagatcagctattatttactagatcctattcaaatatcaaagagatataagtcgaagactcgagccaagaggacaccaaaagcggagaatgcggggtgccccggtttctgcctgaggccttggctccacgagccgaccatttcggtttctttccctttccctcgggttggatgctaactatcgtggagaacattgcaaggctcccttgattttaaaatataccaagatattcgagtctattccagtctattcggacagcttgccgtgaatcggtcttgcatcatgctcggtccctgatagggcgaattgttatctcgctaaatcaaaatgccgaacactgcgtttcccgcacaggagacactgtcctccaatcagcaactcggtgacccatcccgagatcagagtgcagagtattcttcggattctgataatgatcatgttgaactcaatggctctacaagagccttgaagcgaaaacgccccctcactgtctcgtgcgtacctggcggctcgttcgtatggaacgtaaccccgactaaccctacctagatgtgaactgtgcaagcagcgaaaggttaaatgcggtatggtgtaaaaacatcctaaacggatattttgtttctaacatcgacaaacctagaccgagtacaaccgagctgtggctggtgtacccgaaatggccagctatgtgaatatagggaacgaaagaagccggggctgagagctggctatggaaaggagttagagcaacggcttggtaagttgctgtacagtctgctcgtcatctgtctcatgtctcactcgtacctcagatcgattggaaggtattatccaatcgcaagctcggcttatcgagatgcatattctgcaaagccagccttcaatgggtcacgaattagcccatgcagggcatctctcatatagcccttcatccgaaccgtcggcagtccacggacccagtcctagtactgctctttacttcaacgaccctgggtctgctgctactatactctcacgccgtgcggatgtctctatcaatagtccatcggatggctctgtgaggaatacctcacataataatctgcaacacgacttgtcaacggcaccagttggccagttggtacataacgaaaacgcacatcacgattattcaggaaacgaatcgtccctgaaggtccccgtcaatgtatactcaaatcaagagcaatctcttactgatcctgatctagatctgccaccatatgatttgctctatgctttggtagatctctatttcgaacatatcaattcctggtgcccaatcctccaccgacgaacaactctggataccttttttggcccatcgccactagaggaggcagaccgaatggtgctgtatgcaattgtggcaacaactctgcgtttttcctctgataacaggctaaatgaccagaacagaaagcgctatcatgactcgtccaaacaaaaggtcgtcctgtatggcctggaaaattcttccgtcagggcacttcaggcactcgtgattctagctcttgatttggttgggtcttctaatggcccaccgggttggaagctccttgccttgatcacccgatctgtagttcacctagggttggcggtggaatcaaagtcttctcttatcaaccccctctatccctcaatctatactctgagagctgtcactctttcggagccagaatcttggattgaagatgagagtagacgtcgtttattctggatggtctacctactagatcgatattccaccctggcgactgcgttcaatttcgccttggatgacagagatatcgaccgcaaacttccttgcaaggacgattattttatgaagaaccagccagttgagacgcggtggttccaatgctccagcgaccgtgtagactatctcagtaaagctgaaaacgttgggtctttcggtctctatatcgaaatcttaggtatcctctcgcggattcacctgtttttgaaacggcccgtcgatatcggagctctgtcggatgtcgcggaatggcaggctacctatcgcaaactcgacagtgacctcacatcgtgggagttcaatctcccagcggaatatgcttacgaaagttcgtcccgactcttcagtgggcccaagaatggccgggctctgcataacgattgggtgcaattacatgcaacctaccaaacgtgagtgggtcacatctttatcgttttgttctaataaattaatgaagcaattaatctagagccgtgattcgtctgcactcctcagcagcatacccgacaacccgatctccaatcttcacgccctcatatagtgccagccagcgatgccttctagccgtcgaaaacattctatcggtgacaagattcgttgtagagcacaacatgctagacaagatgggcccgcctttcgccttcactctctgggtctcagcacgcctactcctcgtccacggctcaaccattgcgcataccgtcagccccgacatcatgtttttcgtggataccctatttcagctaggaagatactggagagtcgccgagcgatacagcagcatccttcagcgcgtcctggacgagtacaacgagtatcagcaatccatcgccatagacggagaacgatccacaccatcaacagtcaagattctcgccgatatgcgtcgctgtgcattcgacctggactttttgatctcgcggcagccacgtgaatcacccgccgacaatggcatcggtgagagccaccagcccgggccaccactcctgacaatgcccgcacgaaacttcgcccccaacgaactcgagtacctcgacgtttttggtttctttaatgttcctcgtgttcctcctgcacgacctcctgacttatctacttctgcctcttctcatttggaaatcccagggtctgtaccaaatccgatgtcgattcatgggttgacagacgctggccccgcacctccgactgggtcagtagatgatgctggccatcactctaatgtgaacgaattcaacatcaccaactacttgattccgacgccggagacagattggctgtttcggccatcctagaggtagtgcgccattttcagtcgcttcttgcctagaggaccgaccaaaatcttcctccacatttttccactctttgctcttaagcactatgttgtatactacccaggttatactaggaatacccttaccaatatgccttccatgtgatcacagacccatttaaagtggcccacttaaaataaccttattctaaagagactttagcacaaccttggaacacactacggtgtccgcgggtagttatacaagccaaagcgagaaccgaaagcaaagatgatagttccattagaagtgttaactcctacaaataacataacatacatgaaagaagaagagaccaagacctcaagaaacaaagaaaggcaatgggatgagtgaaagcatgcaaagtccagggcctacaaacttcatcgagaacactcatttttactcaaacaaatttcaaacgtgtctatgacacgtcggtacgggcttgcatccgggcgaggacctcttcgaggaacacgtcgagaacagtatcaacaccaccgcccatgtcaacaggtctttccatatcccagtgttggaggctgttgaaagctcgggcaatgtcttcggccaccttttccagaccatggtggattcggacactgcggtcgaagtccttctcttcttctggggtagccgggggttcgttaggattgcgtccgggttcgagacggacgagattgttgcgacgccgatccatggctgcgcggagggccggaagaatcacagttccacaggcggtcggtcgctcggtctcagggggaggtcgggtggaacgcttgtggtcgctagaggtaggagtgggaggggtggagcgatggggcatagcacggtcatccatgtttgctggtgcgcgcttcgacttgagtccggaaactggttttgcgtgttgcagtggctctgtatgtcttggaagagcgacttgagggatacgtggagactgtggctggtgtcccacagaatcagcaacagcgcgagaaagtggagctggcgtgtgcaaaatttgaccagatgcgatgcgattttggtcgtgggggggaattctggagaattgcttaacaggagtgccctggttactgaccgcggagctaggtttggctgaagaagcagtatccaatttgccggcggagtgagtagctgcctgtgcgtattgttcgtttaatcctctcgtgggaagattgtctactgcaggtttgctggccactggagacacgaccttgcgtggaggaagtgcggtctgtgaggagcgttgcttgagaggggaagatggagcagagggaggaagtggggttttggtgggagaaacattgaaagcagggtttgctggggacacttgagcgtgtgattggggttgggatgttccggcttgtcggggtgtctcttcgcacagatcccactcttctgtctcagttcgcgtattggtgccagagcgcgacgggggtgcagatgtttttcccacaggacgaacggtcccaaaatcccaaaggtcttccttttcttgggttctggcttttgcggtttggtcggcttctctatcatcatactcatcatattcgtcctcgtcgtcttgaccccgatgagttatttgccaacgttctgcccgctcaatgagttccgtcaggtaggttgttcttttggcgcgcttcacaaacggatgctcaagaagctccttggccgatggtcgctccttagggtctcggcgcaagcacaattcaacaaattgcttgaacggcttactaaaatcgcctaccaatgtggggggcgggttcttgggaatcaagaacagcactttcatcgggtgaatgtcggcgtacggaggatcaccgcaggccagttcaattgccgtgatacccagggaccaaatatcggccttgtaatcgtatccagattgcttgatgacttcgggagccatccaaaatggtgtacctacaaaggtattcttcttagtcattgttgccgacagttgtcccgacacgccaaagtccgccaatttaacttgaccactcgcgctgagaagaacgttggcagctgcaatcagaagtgttagtcgtcgcacgtcgccatttcgagcaattgaggtcttcgtacctttgatatctcggtgtagcttctggtcactgtggagatagtccagcccgcgcagaagctccctcagaataatggcaatgtactcctcgtggataacaccaggtcgcagtagaccgtggcaactaccaccagcgcagaactccatgatgatccacaggttagaccctttcaagtatgagccgtgatacttggtgacatatggtgacttcagctcggacaagatggcaatctccttgatgatatcgtcgacatcatcctcggcattttcaacgtcaatgatcttgatagcgactgattctccagtgcgtctatccaaactaattgtccgaattgggtcagctgtttgttgaaccaatatgtggatatagaaggccgacttaccctttgaacaccttaccgaagcttccaccgcctgtaaaatcacgaggctgttagcaaacatatgaatccaacgacccttgaaggctcaagaattgaaaaacgtaccgatgcaagcttgcttggtgtaaatggtttccggatcaattggaggcggcattttggcgatttatcccagtcaccggaggatgacgatggacatgaattatgcttgaagctatcgaggctaatgatggaatgtcagattcacaaccggcagtcgcctatcacaaggatggagtgtggggttgagccgtacgtgacggtgcttgaaaatggactcggatggctgtctggggtgaaagaatgtcgctatccgatcaatctgaatcgattagataagatctatgcaatatctttccaggtcgcaagattctaggactgcacgggagagaaggaagagaagagaagacgttgttcgtttgggtgctaacaattgataagatgtcaactggtaaacaaagacaatttttcaataggagcaggtgcggcgaggggggtgatcgtaagattccaaaccgtttgtggcatagtcttcacgttgcgattagctcgtctcactccccgggcttctcagggatatctatgtcgtgagctgcccttgcttgtttatcgacgcggggggcttattttgccgctgcttatctgggggcggtgtatctatggcgttccaagtccagttacaacatttgaatattgtgcaatcatctgagacttgggtttcaggcttggagggcatcaaattattaatcggactcgattttgagacttgcgatgaaaacccacctatgtgttcacttttccccagaagttccaccattccaacttctaattcatccccacaaacgggaattcggatgggggcatatcgggacccgaatatctagtataagagtgaattgcataaattagaggtgctttacagacacaaaggcgaactatgtgaagctagctatgttctggggttgtatagctcagaggtttctatgttatacaacgtatgaatatagtatgatggattatatagatcgaaagacttcagcatgtaagaatcctcgtctttcatcccaatatcatctggtttgaaaggagtgattaaactatgtaaactagggcacaggaagcacccgtgacacaatccaaacagttccttattaggaacatcaaacctgtaggtttgactgcatttctcataggctaggctcattctatgaccgtaactatataaaagtacgtcccatgtcttccaagcgaaatgttccttgatccttaagtctgtcaagttggtactgtgtttattatcatgattcattgaatgctttccaggcaagcttggatactacgtatactctcacatcaaggtctcaaggttggcaacaacttgagagcccggtagattgaatgatatcccgaggaattacaaaaccaagcttgaaaacaaaggtgagatcccacgggatccaattcatttccatcaacgccgtgcataaaccaggatgataaaaccgaaagttcaagaaagcaagaggattactcttccagatatccaatcattaccgtgccattcttcaggcccgcatctgcaatgctcgtggtaagttgatcgatgagattgtgccccatgctattcaggtcaaactcgacaccagccttgtctgccaagggaggatcagccttaagccattcataaattctctgaacgggatccgacaatgaaaagcgccgaatgactctgccagaggggtgtcgaaactgaatgcgtgtagttgtggccgggtccgcagcaggttcagtgtgtggttggtcgctgggaatggacgcgaatggggaggcctccgcagctgggtctggttcatccatggtgacatcttcgtcgctggtagcccggcccttgcccttaacagtgtctgtactgcgtgtcaaatcatcagggtcttcgagtgtttgaccagcttctgctgcacccccaagactgttcctcattgccatttccatcatctcctcctcggtcatagcatcaatgctcttgtctttcttgtcggatttgcgcttagcgacaggattgcgcacattgtgattcaagctgtagcgatcgaggaattcgtgaagttgcatgagaaagtccgcaggcttgaccaaaggcggtccagaccagactttcatttgttcaccagttcgagggtcgacaatagcaatgtgggggtaattgtcggagacgtcgcttccctggaagtaatattggaggtaggaagacgcacgggggtcatctttcgagtactgcaggaaaatgaaatgttccttgacagtatcttgcactccagagtccttccacaaatcgcgattcagaacctgacagtcaaagacggatgcgtcctggatattgacaagcagccatttctcggtgtccttcccctcctcgcgcgccacatcccaaggcagtcgggacatgatctcaaagggagggcggtacatttcggcgagcatattggatttggacgatacctccgatgcgcccccagttacggcagcgagttgttcgcgacgagattcatcatcgcccgtccatatggaagatgactcttgctggttgaagattccggcccgacctaaaataaagtgttagtataagttattggaaaatttgaaaacacagatagcacccacctgatcttccacgagctcgtagttggctgagaatattggcgtgcatgtcttcgccactgtcataatccgccccgggccccaccaaagtctctgttgtccgcgccaacggcgctctcacctcatcgtcattatctaggccacctgggccaccatacatttgctcttgtaggcgtcgagccatagcctcatcgtcatcgagtgttggcagaccggattgttggggagtctcatcatcagtgtccgagtcaatattcaccacgtcggcatcatctgggataccagaccgatgagaaggttgagcaggttcaccagtcaagggtgcgcctccactttcaaagtaaagctgcatggcctgctcgatttggaactcagttatctgcaggtactgtatagccagctccggcgtggagccggtaatttcagtgaactgagctaccacgtcgttctccatggtaggcagtgtgctgaatgaggttccttgataaagatcttaatttgagagaagaaagtgagaaagaattgacaatggatacccactgaaagcttaggcgtagaatgaaatggggtaaagactcggagggtgatatgtggggagcgagatttggtgcaaaccgctgcaaaccagaagatcactaggtcccacaaaagaggttgtcaggaattaaaaaaaagagagatagaaaagaaatagaacgtccagcttcacgactgaaagaattcggtcatctcgaatctaaacgcacatgagaggataattgacacctgaggtggccagtgacgcggctgactaagtcttggagaaattgcacctgtggctgctacactgggccgtagctctacgcgcgacgcgtccagcgcgttgaccaggtggtggagctgccaattacacttcctaactgggctctgggaccttctttcctgacattcctcttttagctcccacggaaactacgtctattgttcctaccccgtcgtttttatagtccaagtcatggcaggaacagttctaggaaagcgcactcgtggtgtcgcggacccaggtaagatcgaccatcccaccttcctctgctccttatcttcaagccctaacccgtcttctagcattgccggtgcgaaccgccagcaagcgccgaacagttgttcctcgagctcaccaacaagataccgttccaacctcattacgacgaacaaggtcaactgtaaagaaagctgtcgaacaacctgaccaagaaaatggcgagagcaagacagcgtcggagaatgtttcttctaaacataccttgcgcgatgaccagttcaaatctccggtcaagatcaattcgcatttcaccgtctcgaaaccggtggaaggtaagttcgaaatttttgggtgttgcgcctgaggcaccgctgatcggacatgcagaagaaattacgaaacctatcgagttcgagttcaagacaccttcgaaatcgcgattccgagatgatttaccgcagtctcccgtcacccctagacatcgagtacaggtcggagcaaaggcagtaacaccgcgcaccccccgccatgccgatctccccccgacccctaggcagagtgccactccaaaaattgtgaactcggtgtattcgcaagctaggcaattgttcgcccgaggctctaactcgggtcgcttagtgggacgtgatgcggagcgggaaaagttgatatcttttatcacagaaggagtgaactctcggaaaggagggtgtctctatattagcggtccgccaggaaccggaaagagtgccatggtccaggaagtgtgtggagatctcgatctttctaaagtcaaagtctcgcatgtgaattgcgcaagcatgcgaatctctcgcgatgtctacagtagactcatccaggatttctgcgaggactcggatatgttcaagaagagcgaaggcgatcgcctcaaatctacgttcattccatccaagaaagggcaagatatgttcctggtcactttggacgaaattgaccatctgctcaatggtgattcaggggttttgcagtcgcttttcgagtggtcattgcaaagcaagtccaagctgatgctgatcggcatcgctaacgcccttgatttgaccgaccgatctctcccacagttaaaggcaaagaacctgaagccccgtttgctgccgttcttgccgtacagtgctgcatctatcgcaaacgtcatgaccaatcgtcttcgctcattactccctgctggggcagagtctgacccaaagcttgtcccctttgttcaaccagccgccatccaactttgctccaagaaagtagcctcacagacaggggatctccgcaaggcctttgagttgatcaagcgagcaatcgacgtcattgaacaggaaacattacaaaagttggacaagcaagctaaggagtccgagaatgtttcgatactaggagagaacaccaatttgtcatctcctgccaaagttggcggtgctccgaagccaacttccatgtcaagctacacagtcatcacggcaccccgagccagcatcgcccacattgcccgaatcacatccgcagctttcggtcaaggcactgttcagagactgcaaagtttaaacctgcaacaaaaagccgctatctgctctctgattgcgcttgaacgcaaacgccgccagttcgaggttccgagcacgccgtccaagtcgcgtacatcggcacccactatcaagcaagcatttgatacatattgtgcgctgtgccgcaatgacaacattttacaccccttgactgccaccgagttcaaagacgttctcagcaacttggaaacaatgggcttggttggagaataccagggtcgcggtcgaggtggaactgttgcaggtggcacggatctgcgtcgcacaccctcaaaatctggccatgctccttcgactcctcataaggcccttgacgagcaagctcttgtctgctttgtttcccagcaggaaatcgagagccagatcgttggacctggcgaaggaatccttcggcgtcttctacgcggcgagggactatgattcccttccctatttcttaagcgcatccatacagcatggcgaactttcatttttcatttcccattccctataactgcatagtcggggtcccatgcgagggcatttttatcatgtataacatgcttggagtttcattttggagttggaaatatccttgtctcatcatctttagcgtctttcaatcacggctttccttgttgtcaactctcctttgtctttgctcttgttcaaagtgaatcatgagatctctacacaaaaccagataaaaacacaaatgacttgatcaatggaattgaaactaaagagttttcgtagccctaatcgatattgtctcacggatcgacatgagtaagtcccaggttagtcggccactaggcatgtgatgctggttggttgggcatgactttttgccagactccacgagtcatattattgtcttatataccatctctatcgagctaagtagaagatattttgttctaatcgaaaccatatgagggctttcatgtaaaaagcccatgcatgtaattttatatagcacctgtataagatttatatttctaggaaataagaacaaaagaaatgaatccctgtcctctctagtatattctagagacaatctgatggtgtgtgtcattcatcatgcagacaaacaacgaatcaaacaataaaaagtacgccacctcgcatgaagacattacgtatataaactattcagcttggtttttgttctttctgttctcacaagatatcctgctatcagagacatcgggccctttgcgaataaccttcagcctacttaccaaatcatggcggaaatccaagcacaggtagaagcctctgctctcctgcctgatagccagcccaacgaccctcagccgaccaaggaccccgcagaagactgtaccgagaacggcagatctgttgtaccctacttgttagaaaatagtccagagttccgagaactcagtgatttgagacagaaggctagtcacaccgaactctgatattatacgtatatgattctcatacgttgttaacagggatgggaatcctccgaaggcgatcagtactttgcgaaacttcgtcgaaatgccgataaatccgacaaaaaatcggctacctacttttataagtttatgagagtaatcggacgcgaaattgacaaggccaccaatgccttcaaagcccaacgggttgattcaacctcacctgccattctcgacatgtgcatggcccccggtgcattcctcgaagttgccttgaaaaagaacccgggctcacacgctctggctttcagcttgcctgtctccagtggaggctataaaagtgtcctggcaagcgacttggatgccaagcgggtatttctcgatgtgacaatgcttgctgcggatatggatatggatctgatccccgagggccatgaagatgagaaatttttgccccggcaacttgaggaagggatgcttttcgatttggtcatatgtgatggtcaggtcttgaggcaacatctacggcccccttttcgagaaacccgagaagcaacgagactgatcatcacgcaacttgctctgggtctccagcaccttagacttggtggtactatgatcgtccttcttcacagacttgaggcttggaacaccgtcaatctcatttggatgttcagaaagatctcgtgggttcggcttttcaagccaaagagcggtcacgccaaaagatcctctttttacatggtcgcaaccaacgttgacagccagaacccggaggccgttgaagcggtcaagcggtggaagagaatatggcggattgcaacgtttggctcggatgaagagtacggcaaggtgaacttgtacgaagacacatcggtagaaaccttgctcaaggactttgggccggaacttgtgaagttgggaaagacaatttggaagacacaggcaaatgcgttggctaaagcaccattcatggggaagcagaaaccagagtgatcaatagaaggagaagggtgaccgagatgttattgatatcactcatcacaacgattgacttgaattgattgtttctactagcccactagctctcagtgtaaagacagactatgtagctctagacttgaatcaaacaagaagatcatgaaatccagataggtaactagacgaacctaatcctaccctcaagcaagatagagcatttgaatatcagagcgtcacaaatcccacgctgccaggaggattttgttacattttgatccacgggtgtcttgtgcttaagcaatcctgtgcacctggacaggcgatgtcgactcacaggttgatatggcaggagcatatgccttctaaactttcccatctttcttgtcgagcacaagagcttcaccttttgacatcttcacccttcgacctaatcatcaccatgactgcctcgattctgatcctcgttttctgcgtactctttgtgcccggttcaataattgttgcctcatagtaagtcattattagccatcttattacgcttccttcgcggactatgctgagacctcccaaagcatcctaattagcccgcttcaagcaacgacagacacggctcctcccacagtcgtggacaaacattgcagagagcaggtgattctgtatctgcttgagaattctccgtagataatcaacactttcggatggctggggatacggttctacctcgtgtggcgtcttgtcaagttttgcgtggacgatcttgtgaaaccccttgttatgtcacttgccacaactgcctacaggtaacgttatttgattgtctaaatttgatctcgaacctgcaaagctaattaccggcatagagctttcaatcgattttggttccggaatgatggcccccaatgaggaaggaggcaggcgccggctactataacgcccactttgccaaagtctccctagctccaacattcagcagatcaaacgtattatgatgcatcgagttttctgtatctataatggataactgaggaatgcctgtatcttttgacaaggaagaaaggtaggaacctattttgtttctgtgatacagttccccgatattcctgcagacattatgtataaggcttcatgatatgagatctaaattgcctcacgatattatcaagcagcgaagaatatcaatgcaacatttcccccccaaattcctctcacctcactatctccccgtcaattacgacccccatacccccacgccctcttatcgataaaccccactacgtctccggtatataaatccgctgttgagacccctgttatccctaccaaacctatcaaaaatggattattctctacagaatcacgcttcctatatcggccgaccggtctccgaacttcccacccctgctcttgtcctgagtaagtcggtgctggagcggaacacccagatcttgttggatgatgtcaaacgattgggaattgagtttcggcctcatgtcaagaccctcaaggtacagcttctatgcagtattagcttttaggaaatgcactaattgcattggacctgcagtgcatcgaggtcacccgcatgatgcttggcaacggtacgcaccgtcggatcgtcgcatcgacgctagccgagatccggggggcgctgggtcttgtaaaggaaggcatcctagacgaggtgagtaacagtaactatttcaaaaccaaagtgtagcagctaaaccatgacagtgtctctacggtctacccatctcagccagcgccttgcccttcctcgagactataaccaagtctctgaagattattctgatggtcgacagcgagcagcaaatagatctgctagaatcctacgccgccaaatcgtcttctcccgtagcaccatggcccgtcttcattaagatcgacgttggctcccagcgcgcgggaatggtcacagactcaccatccctccccagattaatccagcgcatcgagtcatcgtcggcagcgaccgtttacggcttctactgccacgccggacactcctatgcatgccgcacagaggatgacgccgccgcagtgctccagaccgaagtcgaaggcgtagtggaagccgccaaggtgttggtagacgggaaatccgatagacggatcgtggtgtcggtggggtcaacaccgacagcacacgtggtgaaaagactccagggtgcattgcccgaggggatggagttagagttgcatgctggtatgtgatgcgtgacaactagctaggtgccatactactgcctgaaacagaatgactgacacggacgctaggaaactaccccaccaacgaccttcagcaagtagcgacctcgctcgtggaaccgacacagcaggcggtgcgcattctcgccgatgtctgcagcgtgtatcctgatcgcaacgaggcgctcatcaacgccgggaccatcgcgctctcgaaggagacgagcgagttccccgggtttgcggttgtcgttgatcggccccagtggagtgttgtgcggatggcacaggaacatggcattctggggtgggcggagtcggatcagacacgcaggcttgttgcgaagacggggtcgaagtctggtgatggggagaaggtggaagctgcgtttgcggttggggacaaggttttgttgtatatccagcatgcttgtatcacggctgctatgcattatgcttattatgttgttgatgatgaggatattgttagggagacgtgggttccgtggaaggggtggtgattgtcgtggtttttagagtgtcttttttcgtatatacttgattgagcatcaatagaatcatgtatcattattaatagaaggaaatatatccgtactctgacattttaatctgtactttatatctacaagatctaaaataatacatatcgcccagtttaattagaccacttgatatagtgatagtagagttggtgaatagcatttacattgatcggtacatttactcagattgaattgaacatcggatataccctgatcatgaaatgagcttggtgtgagatgccaggtcgttcgaagaaagagtacattaaacttgatcacgaagaggaagaaagaagaagaaagttgcaaagtgggaagcagcctgttgatatagcaaacctcgaatatctcgcttagctatatagcaaacaatctatgttgcacacatcagatagtcgacgaccagtagagtgatagaacagacaatcatgtaacacttggcaatatctggcacaaatccaataaattcaagcaccccaacgcttcttctgaaagtgatatgttgaaagtgttgaggacattcttgaatagacatggcagaggtagaaatagaacgaatagaagagaagagactgccaagatatatcagaaggaagactactaagtatgccaccgatacttcgtcatcgctcaccgccttcacgaactatgcatgttaacagatgctaaccctatatcaacttccatttatgtcttttgatgtcttttatactggctttttatctggtttttgtactacttgctatgtgggtttcaaatagaagatttattactagttcaacaccagaaatacctaccatgaagcacactactggtagagtattgctaatttaatttattgactttgaatatgatagacaagttgaagcaattttgtctctttacctataaccggatgactataattccgccaggcaatgatacttattcgcccgtggaactacaacacatcgaatatatccagagatataaaaaaggtgagattatgaagaaagatgtaaaggcattatgtacaggagaaaagtgaatgggtatcatgaaacttggctggaacaagacccggaaaatgtgtggcccaactgttgttgcgtggccgattttctttccgtcgctggtatcacgaggcccgtcgttgagatgggaccgaatgtgagaagtgaacaggatcaaatccatgaagacaaagaaagcaataaattatgatagaacgcaaggcgttgtaactgggaaatgttttgagttgatcgtggggatcgttaagtcgtaatgaagaatgataatcaagatagctgattaatcatgttcaaatttttgatattttattggttggaggactcaatcgaggcggactcaatcgagggggcccgagaaggggtgcgggatggaataggcgagggagcaggcgactcgccggtgacaaggtcgtcagtggtgaagcgcggcaaccggtcgtgcgtagagccgtgcgtggactgatcggaagaggcggtggaagagcgagtagaactgttgtccaatcgcaaggactctatgcgctccaggtcggcgtagtcaggaagtggagagccgttgtagtcttcaatgaagctgggggtaccatcgggcttggtgtaacaaggagggctggcgggaacgtcctcgtagattggaggcatttcctcgtcccagctaatgccaagaccaccacgctgtgtgacgtggaggtggaactgcatgcgaagcacgcgcgcggcaccggttggagtgattaggcgggtgttgccattagggcagaactcctcggccacgataagctcgatgacgaggttgtgcttaacttccagaccgccaggggcctccatatcgcagacggcattggcagccgggttgatgttggcatcgaactgcatggtgatctcaccaccagcggtgtcaaagtcggtcttccagccggtcttctcctcgttgtgtccgatgacgcgagtctcctggtgtagaacacctttgccttcaccgccgatcttgtgagcgtgcttggggcacgcagtggagacaatcttctgttgctcctcgatgcgccacatcatctttcgaagacgccagcgggtctgggtcttgtcgcccttgtcgaccacgccgctcaaggtcatctcgacggggaagtgtccgatagggtaaatgacggagggcagcacaatgcggccagtgaggttggttggaggaaagatgcggatagaggacttgtcgggcccgggaagcagagaacgactgatgtccagaggcagcttgaggttgtaatcctctccggtgacgctccgtgcatgtgccagcaggaagtattcgacctggcccagcacgccattgcacgaggcaggaaggtggccggggaatagatagctgaatgggaagtcgtggtccccgccatcaaggtgaaggtcctcggtgatgaaattccactgcgtcaactcttcggtgcgagtagcacagttggagcagtgattcgagacaggcttcttggtggttgtcttggagacgagacgtacatcaaactggctcaagatgactccaccggtcaactcagcgactgcaatgcgcaagcgtcccgagaacaatgcgccggtagagctggcaggtggaccatagcagaccagtggtggcgactcgatcaggacatccagcttcgccgctggcgggtgcgcatcatggctggagcgctccttggaacctcctgcacgtccggaagtgcggcgcttctctttgctgtggtcccggagagggtgaatgaaatgatccattgagaatgatagacggcgttcgggagatcgtgcgcgctctgccttgtgagctgacttctttgtgtgtccggggatctcattgacggagagagtcgaggaggagttggagtgattgggagttgaggtgacggaggagtgtagcgaactggcgttcttaatcaggttggggattagacggcccggcatattggcgactgggttgtagaggctcaattgggagtggggtgatagttgtatgttcgtatgttcaggaagcagtgcggtgagggaataattgagaagcagatgaggcaatccaacacataatagtccctggaagtatgtaggaaaaagatctgcagaagaaagtcaagttgttaagtgcgcgacgtgccgcttttgaatggcaagaacaatcatgtgctaatggactgaacccatggaaaactaaaaatgaaaccccaaaacttgaattttcattctttttccgttctttttttatttttcattgctgtttccactggccaggtaccggggcagtcaatgagaaaaagaaaaaaaaaagaaaaaagccagccggtggggcttggaatagcgtcatagtggggtctgacagtacggatacgtggtaataacacttaaaaatacaccgcattcgtgattttacccctccaaggtcctattttgatgcatttgtttgttattctgagatcatcctgatcaaccaagtcgcaattttgatgcactctccatcacatcatttcatcttatagtttcaggtagcggtctgatgccgagacaaagagcatgaactgtcattgttagacgtttatattcccatggttggaatacaccttaaacccatgtacaatcgacttcataaccatatatctcgcccaaaatctagcatcgcctgactcaacttctaccccacatctcaaatgatagtctcggtatcatgcttcgatcaaagagaaaagaacatcagtaaattccaggctagaccccatcagggcagtcagagggagcacatgatgccacggttggctccagccttagcgtagaacccgtggacaaccgtgcgtaatgactcacgtatctacgatgtaccggttcggctaaaccggtcggatagtgatggcctactcggcttggtatacggagcaccgagtactgatggtatacttcctttagcatgtgggttgcccgggttcaatctataacatacagcctcgaaacttagctatggcgaatgtgaccaatatgaccaataacaggagggaaccttggaggataccccggctttagattatcaatcacttcatagccctcgcgaactactaactatacgacagagatgtgatcaggtgtctatgtccttgactcctagtatgttgtatcttaccttgaaagtgccacgacgacactcctgcaggtatataatgtttcatccctttccaatttctgaaaatactcgcctgtctataaatactctgaaatccagctatactaagccatcacgtggcgtgatggcgtagaatgacagtaatagactgcgcagtggagagtgtccagacctgggtaaatgacgaacaataccatacacagccgttaccataccggtcatgatctcttccagaagatcttcgactagcgctcccctaaataaaatccatattttccgctttgggacaaccaaacgcgatggaaaaggaccctttgcggagctccacccggaaaatttttcgtttcccttttctcctgttgaccgcctgaatgcgacggagggggtgcagtcgtctgatctataaaagtggactatagttaggggcgggcttctctaggcctcggagctacgtattccttcctcgaggtcacgctcgtatcctgtgcgcctctaccccgcactgcaaggattgcattttgcgggggtctgagcaattgcgagatcgaactccctcgacaagagcaacagaagtgaagcaatatcaaaatactgtatctatcaaactgcgatttacaatgatcgtccaaaacgttctagcccttccacttgtcaagatatgctccgtgctcacaaggtcgcccccctgacgaatcactatccccgccgcacacactaattacctaacagcaacaacagcatcaggagttaaccgctcacgtctcacctatgagcatcgggctcgcgcgcagggtgcccaggcactggagctgtagcatgtagcacagacacgttgtgccatatgcatgcagggagcttgaagcattgcagcttgtttggctacgtcgggttagaattcccgactcgtccaccctcgagccatacaacatacaacatacaacatacatatatacggagtacattatagggtccatagatgtttcctcggagcgccagggttctgtagtgagctgacggaattgatcacgccatggcatttgttgtctttgaaccgggctcggagacgcggatgcggtgatgccatgccggttcttccttgcagttcctcttccttgtacttccgggcacgtcagcccttgatgcattgcagtcggtgatttgcattgtcaagctggatcaacctaaataggcattatgataatatattacgcaacgtggtcctgatctgagtaatactacggagtactccgtactccgtcagtatttagggtagtaatatactagtgattccaacgcattatataaagtagctccactgtctcctttccctaggatcattacggttaatatgcttgattcacggctcggaaatcacgatcgcaaatcagtggctgtcgtccgccggtcggatggactagccaataattgctgctaaatgggacatcggcttctcaggcgagctgcctctttcggggcgatctcggattgccccgatctgtttccgccggcgtatgatccgcctttttggggctttgtttttttcgacatttaattgccggatttgcactccttcgattgtcgggaaagagtaggtactaggtacaaagcacatcgtggagaaaacgtgctccgcacattgaaccatagatcatatgggaataacgccatctcgtcataatcccaagtggatataagtacgtacctaagcagaggcgatgtgactacgggcatcgtactgtaaagccttacaaattacctcgattttctgcattttataagcgctcgacaatagctggactccgcataaatcgcgccattttaaaaaccgcaaactagagctgaaacgaactggaatgagaaaaatagttccacggacaatggccggggctccgctcaagcgcgggaaagcagaaaatttctgttcggtcatccactcagaactttatactcggcccgttgcaacgtgatctttagcctcacctctgcgcggcccgctatggtaactgtcatccctggttcagagtcccccctgggtgtttctcctggcttaattggagcatgtatagtgcgctgtacagtcgctccaccgtcgatggggcggaaaccgtactttcaactttttctaggttatgtgttggaggctagttggtcgtctcttggggtaacaattagctaacctgtagcttggcagtgagacgttgttatgagacccggcccgttagccggtctgatagtgcagtggcttcgatttggctggcggtgtggatttcatgtgttggtattgggctaggctcgtctatcagaataaagaaatatatacggttttatagtcgctggtcaaagcgatgtaacgaggagcataccaaaaagaaagtagcttcagtgttcaatccttgctcgtctcagccttttgtggcttgaatagactctaaataataccttttatatacatatcgattcttatcagatcttgcctgaaggagaccatgggttcaaggggtgtaagatatttcaattgtctgaacgtcttctctgccatctattcgcaggcgttgcattattgatctatggaaagtgaatcaatatcaagagcaaagcttccaccgtttatccggaacggcggtttcgaaaaacgattgaggtcgtaacttcgaagcaaagaagtaagtctgttgagttgatagaaagaggtgttatcgaaactgttggcaaattcaacatctgatgcacggagaaagtgtagaaagaattggtctgactcaaggcgtttcccaatgagacatataggtgtcacctggtaccgatgctccattgatctgatctatagttacacatatgtggtgctccaggctaaggcctgctacactaacctttgccttctaagttctaccttgagatatctatccatctcatcgttataatccatcaccacttgggaatcccaagctgatcttgaaggaagtgagttgtggtctacggacaccaaccccgaagatataggcgatatatacatcgaaggcttcaaacggggaataaagacattccaacatgagaaataacagacagtgacacaagacaggctggcgatcaggggcttagaacctctcaacgggagagtcgggtagcgcagtcaatactcaaaacgaagactgcaagctaacagaagatgaggtaggggaagagaggaaagcaaatccattgaggcaataatcacgtcactccccgacaacaaacttatgttgtatagtttagcatgttgaatcggggtcagtctactttttagatccttttgccaatggtgaggcatttgatcttggttgcgctctccaaaaatagttattgactagttaactagttagttatctggactgattgactaagggggtaaaggaggagctcttcaagatatgtatgtataccgcggcgtcgtgcataaatccgacacgtgacccttccgagtgtggatggataggaatcacttgagcttcccctattcggatgcaagctcaggccaccgtgttctttttttggattgtttcagcgtcactatgggcttggctgttacttctcctcagaagtagttgaccgctgtatcaacacgagtgggatgattcgctgttccccaccatacacatgtcttgactttggtcgaccctgatccacccgataaacaatttcaccacataacaattaagcactgcattgcaccaatctcggcccaattaccatacctaccgtattatcaccctagatcgatcctcaatccttcttggaacacgaagaaacggaaccacgaggcgtggaaccccggaatctccagacaactcgtgcaaatccgacctgcaccaattgaacacaatgtcgacctcattcaattggaccgcgttagcggtagcaataaccgcagtcttcatattctggaccttctcctcaacgtcctcctcacccttcacacggtccttcccacgcctcgaaaacaagcgcatctgcctcctaatcgcacacccagacgacgaagccatgtttttcgcgccaaccgtgctatcactcaccaagcccgagctcggcaaccacctaaagatcctctgtctcagcaccggtgacgcagacggcctaggcgagacgcgcaaacaagagctccaaaaatcagccaagcacctcgggctgcgcagcgaatcggacgtcttcatagtcgacgacgtgaaccgtttcccggatggaatggacaagaactgggacgaggaccagatctcgtcgctgctggcctcggctttcgcgccggaaatggcggcccagaagaagctgcccggcaagcgtgtcgatcgtgataaggctcctgccgctactatcgatgttattatcacattcgacaagcatggtatcagtaatcatcctaaccaccgctcgttgtactacggcgctgtgaatttcgtccgcacgttgatgaatgataagcctgggtttacttgtccggttacgctgtatacccttaccacgacgtcgctgtttcgcaagtacgcgggtgtgcttgatgcgccgctgtccatgttccttggtgtctggagtaacctcattgctgggttgacgggctcgaagaagaagggtgcgcgggctgaggttggtcctgcgcggctgctgtttgttagctcgataaatgagtggttgactgcgcagtctgccatggtcgtctgtcataagagtcagatggtttggttccggtggggctggatcactattgggagatatatgactgtcaatgaccttcagcgggagaaggtctagatgactgccctttccttgttcctgttttggaattctgatgctctggatgaagagctagcttcgtaactgtgctgcttctgcccggatcttgtgtcattttggccgatcgcctttgctcacgcttcatgtctgcatatgatctctcaaggcctaggtgccttcttgtatactcatctctactattcggcttacgcagctcatgtctcgagagccttcatgatggacatacatgtcctttagtacggaaaaagtccagagacgaaaaaaacacgaagtgaataatcatactgcagatgaaattgtacaattggatatcatgaatggtggacatcaagcacaaatgcttcaaacgatacaaaagaaagccccggtcaacaccaaggattgctatcccgccagaagatagaattctggggtttggcatcaaagcctagggcatgaatgcgaccataaaaccctgccgaagggttgttctcttgcgacaaaggatgatcttcggggtaatcaaccctcgtcttgagccttctgagcttttcctttaattctttggtgtgcttgacctggaaggagtagatgcgattgagcggcgaaatggacgggtccagctgcgggtactcataaagcaagatttcccagaatatcctgtcatcgagaactttgggctcaactggatggaacagttccgacccatttgggttccgccgcgcatgaatgcggccatgcaggctcatgtggcggctcttggaatttgtttggccttggaaatcgactgttccaacatccccgtctctatattcgtacctattacgctctggcaggaagtctttccattcttccaatagcataggccgttcttggagttcccagactttgagcgatatgtcgttccacctctttgtgatgatcattgaataggctatgcgttgcatttgataaatctgttggaagacttcgagccggaggagatcgtatgtgttgatggcttcagcgagcaggggacaccgtagtagtgacaggtctggtttcacgccattctctcgttggtacttgattggatcccgcactttcctatcatcgttcgccggtggtctcatgctgtccaaaactggctgcagacattgcacaaccaaatctctcgcttccttcctttttgccctcgtttggctcaagacgtcatatgccttacgcatgtctgttttgcaggcctccaggtcgccgtccagtttgttggtttgggtcatatatcggtacatttgcagagtcgcaggaacattgtacggcttcgtcgtcaatacctgaaacatctcgcggaccatgtctcttggcactttgcccgttcgcccatcttctgcctgtctccgcttgtgttctttggatagagtaaatgtcctttcaagcaactcggaccagaccttagctgaaatggtgatgttgtacgaggaagccatgaagtcgactgttctcgtggcggcgtatatgtcgttgtttgtgccaaaggcatgagcaacggcgaaaagaagacgctcggttgggtacagaccggaccaagtctcatagggcgtaacgggcggcagcattgagtcgtccctctcagtcaagagggcatcaacatcaacattccatacagtcttgaggatatttttggcggcttccctgtcgccaactctggccgctgcgaggaggatgttaatgtatgtctgctcgtccccagtaagcccgtcctggctcatttgactgaatatatccagcactgttcctttgacactgttccacgccgttgcaaagccacgccatccaggattcggatctaccatgcggcgctttttgtagctgtgagggatgatgcgagtattgtatgcttcttttcccacataacaatggttccagaccaatcctgccatatagtgattatagcacgctgtgtcgggagcgacattgttggcatgcatcccatcccaaagggcattgacgagggggccatttcccatcgcctgagcacagtcgaagaggtgagtgtactcggctagttgaggtggatacccagccacggttcgatactggatgatcgtgagcaagtcccttgtaaagtcatcgaacaccgcttccaatgtcttgagtcctagcatcaacacgccccacccgtgcagtgtatggtggagatctcggtagggtatcacgaaatgagccggagagaggaggtgcagggcttcgataaacacggttggcggcagcgatcccactagctctaccgaccgtggatcagccatggcttccctcacttggtttggttgtccgttttcaataactcggaagaagttcgccctgtaccgcgcctcctcttcgggtgagatccattccggtaaagggacttgtatttcattttcgaaagtcgcaggacgtggaacagcgagttcgctggtccgttgtcgacttgttgtagtcaattgccgtatggaactatgatagcaagtttgttgtgttctttgcgcaaaaacatcccatgtcttcgtatttggagatgccacgacacaagcaatttgcctcgggccactgagatgaaggtatgggggaaattgtgtgggctttctgatgccggctccaggacgagacgagacaccccagcgagaagcgcacttctcggtaagtgagaactttagcatggggaaatgatagcgaggaatcagtctttaaaaaacaaaaaaaagaaaacaaagagcacaaaatcacaaaacgaccaggggcttgaatgaggggaaggtgcgcttcgaccccggatcttttgacagggtacttcatgcaagttgtgattcaaactaagcacaacaagtacaagacccctgtacaaatggttaggcgagactgtgtcagattacatgattctatgattattacatgtggttattatgtggtcaactacctatatcgcacatgtacagacatccaattccattgatccacctctatacatcacccctgggctgtctagatcgcgtgtggatacttgcaagacagaaaacccggggtaattgctgactcagcacacgttctgccaagcgccacgctaagccacattgggtaccagccaaagctcgttgattctgcgtgtggaccggcacttgacccaaatccaatcacccttctatcatggccgacaacgaagataccggcggtccatccgtctcagagcccctggatctcgttcgtctctccctcgatgagaccgtgttcgtgaagctgcgcggtgaccgtgaactcaagggccgccttcacgtaagctacccccaccttgcaatcttcagaataactactgactatggtacgtgtgtacaggcctacgacagtcactgtaacctagtccttggcgatgtggaggagacaatctacgtggtggaagaggatgagaacgaggaggagactttgcgggtatgggatcatatgaatcagagaagtttacgcgggcataggctaatctaggttatcggatacagacaatcaagaagcaagaagagatgcttttcgtgcgaggtgagttggagcaattatggaatatcttgggtgggttgctgacttctacctaggagactctgtcgttttgatctctccccaggcatgacgagcttgatatgcccttgatatagagcacggcgtccagcgacgggaacaatactgggaaggacacgagataccacaaaatgcagtcaacatagataggtaacgataccatggaaatcgattatgatcatccatactagtcccgttggatatagttggatatatatccttggaagctagaggaggctgagtattccatatgcttcgacattcttcctagtagatttatattgagtcactggtgagccctgaagtctgcctgggcggtcgatgactcaactggtgactccgacttatcgataaagctccccccatgcccctttgtaccttgtactctcaaccggaatacttcaaatattcacttcagtctcttttatcttttgttcattgagcaaaagagaactatgatcactcgaataacacttcaacttcatatcaacagtaacggtggcccgatccaccgaccaataacgtcactaccccaaaaggcggcaccgcgatcagtcaacggttgaacttctcaactccacacaatgcctccaaccgggaaactaagctacgaggagcgaaaacgaggtgaagtggtatgtgtctccagggaatatgtgataagtgcctcatcttatgctcttcaacttaggctctcagtgaattcgccgagtatgccgataaacagcaagcccaccgctccggccaagtcgcacccagcgacagcagatattccaccgccagtgtgtcgcgcgatctagaagatcatgcagagctcgacattcttgatcagctagggctctccgatgccccccacgcggccaagctgaaggagctcctactcggtacaggcgatgccgttgaagacagcctgcaggtgctagctgggacattacaaacacgcattgatgaaggccatggggagaccatcttcgatcttgggttggaggatggtggtgaatccatgggcttcgacctcgatcaatggaagacggcgctgcagcgcctgcgcgaggcggccgagaccatcaccgcccactgccgagtattgctgacctacaacgtcggaggccctgaagaatcacctgtcacgcatggccgagtacatggcgcttggggcaaggtcctcgtgcgccatcaccctgataccatcgaggaaatggcggagctccggattgccgtagtggggaatgtcgatgctggaaagagcactacgctgggagtgctggtgaaaggtggtctcgacgatggacgtggtcgtgcgcgaataaatctattccgccacaagcacgagatagaaagcgggcgtaccagctccgtcgggttggagatcatgggcttcgacagccgaggtgaaatagttagcaattcgcaaggccggaagctctcctgggaagagatcggcaagcggtctgctaaggtcatttcattctccgacctggcaggccacgaacggtatctgcgcaccactgtcttcggtatgttgagcagcagtcccaactactgcttgctgatggtcgctgccaacaacggtcttatcggaatgagcaaggagcacctaggtatcgctttggcccttaatgtgcctgtcatggtcattgtcaccaagattgacatctgcccgccaaatatcctgcaggagaccttgtcccagctgaccaagattctaaaatcgcctggcgcacacaagattccaatattcgtcaagaacatggaggaaaccattaatacagccacgcaatttgtcagccagcggatatgtcctatcttccaagtgtccaatgtcacaggagagaacctcgacttagtacggaccttcctaaacatcctgccccaccgcggtcaatatgaccccgatggggccttcgagttcctgatcaacgacacattctctgttcctcacgtgggtacagttgtcgcgggcgtggtcaaatctggtgtcattcatgccggagactcggtcatagtggggccagactcactcggccagttcaccaccacagtcatcaagtccattgagcgtaagcgtatcccggtgaatgcttgctttgctggccagtctgggtctttcgccctgaagcgcgtccgccggaaggaagtgcgcaaggggatggtagtattgaaaaagatggatgcccctccaaaggtgtatcgggaattcgtcgcggagggtaagtcgtcaattcaggttttattgaccacatgctaatgaaaatagtcctaattctttcgcatgcaactaccatcaagcctaaataccaggctatgcttcatgtcggggcagtcagtcagacatgttcagtcatcgacatcgatcgccctttcattcgtactggagatcgagcgttagtcgcatttagattcgtacagcgtccggagtttttagcccccggggaccgtgtcctctttcgtgagggcaaaacgaaaggactgggaattgttaagagcatcgattatgacccgaccaaaccgttgagtgcaaatgcaaaggagggagcttccacttctgcacctacgatacctcatgattagatttactgttgctttactttcaagggagattctttgttcttctttctttgttccttcacgttttgatattttccttgctaagcgttcagacatcgaatccttttgtttggattctatttgtgttttatgtttaccctgttaatacactggtcaattggctatgagctggctagattactgtagttctattattactaccttgtgcatctatttgttgctacttgctgtagtatgaggtcacatgatatatattgcttgacgtcactctatgacatacgcccagaggatcgccgctttcttacatatgtagcagtccagtttatatcactggatgatcattcgcaagccattgagcgatcagtggaattatatcgggtcttacgaaagactgggggtccatgtgcaagccaccgtggcccaacaccactgacgtattgaacaacgcggcctcagcctgtgggttcttaaagcttgacctgcccagagcttctaagcattcagcccactcgccacttacatttcgagtataccaaacaacgctttatcccaccctgctattatcatcctcctttacttagtatacttcatctgttgtcctatcatcctttcaccaaatctctatctatacccattcgacatctgaactataccaacacgatacaatcatggagactgtcaccaaatacgtcaacgctgcttcgactgccatctggggcgagaatgactccaataatgcccaacagcacggcgaagagcccgcatccggtgtgcaaggccaaggacgtatcaccgacccctatgatggcggcaaccgcgatggtaagtacaatagttataagcatatgtttatacaacctcaaagcacataactgtccaatatatctaacaatccatccacagagcaacccggcgcaatccactcaaacgccaacaccgcacccctaaatgcccacctggacaacaatcaatcaaagcccgaggtcactagcatcactaccccccatgcccctagctctctcaccgcctgcaccagcatcacacccgctctgcctgtctccgacggccctacagcagacagcgaagacaaggaaaccaagcccatctccagcggatctatagcagacagcgaaagcaaggaaaagaagcctgtctccaacgactcaacagaatccaccgggagcaatgatgacaacagttctaaacaagaacagcgcagcacttcacaggctgaaggtggcgagagcagcgaagctccccacacaagccgtacccatgacgtgagcaaagaggcgctcaaaggcccgcagggtcctgcgccgacgcctgctgaggacttcgagaaggagtataggggaaagaagcctgcagctgaagatgaggatattgagaccagtatgtttcccttttcctgttctcgctttgtcgtatttggtgctgacttttgttatagattctccaagtgaatctagcgggaagtcgcctttgaagcctgagcgttctcctgaaaacggcgagaagaatgggaagctctcaaaggtgaaggagagcgtcaagaagcatcttcatcattcgagcaaataagagcagcgtctttgtttacatcggatctatgaaattgtgattgtgatgatgcctcagttactttgacttcggatttgcctttttggaattttgaggtcatgtctatattatgccggcttgtctatttgacacgccttatttcgttcgggtgtattaatatccaattgtatttcaatcatttaaaatcttctttgtaaatgtgatgcaaaaaaacaaaatgagatttctagggctataaattggaaataaatggtaatttacatttcaccaaagtccaatctcaatctcaaatccacacacgccggagcagggtatcccaagtgtaaacagaagcaagcaaccattcggccatcgaaacaatcactcgaacaacattttcaactcttcaagtctgttcttccctttgtcagattcactatcatcgccgccaatcttcaacccaagcgagccagcaatattcattttacgctcttgcacgcgcagcatgcggccttctatggaatccttgaccacgaatcgcgtcacattgacatcgcgtgtttggcccattcgatggacgcggtcgatggcttgtgcttcaattgcgaaactccaccatggatccatcaggaaaacattgcttgcggtggtcaggtttagccctacgccgccggcacgcagggagatgagtaggactgtaggggctggcgtcggggatgagggagagctagactttgcaggcccgcttctccctggggtatcgtcttccatgtcgacgatgtcatcgtcggtaaagctttctgctttggtaaactcggctagaacagcggcacgggccttttggggcatcgagccatcgaggcggagatgcgagattccgactttggagagctgtgggccaattaaatccaagaaagatgtgaattgggagaagacaacggatttggtatttggagggatgcgtccgagatgattaataagggcgtggatcttggctgaagtatgggcggaaggagatagggggtatatgcgacggagggagattcgtggggcaggttgggagctggttggcggcgtgctgctctcagtgtcgtctccgaaggaaactgaatttgaggacgggtgtcgtactacttcaaaggtattctttgcatccactggggcacggcagttgaagcatcgtgccttgacgcccttgttcatttggtgttgcaagaagtcttccaggcatttcttacacgcactatgccagcacgctgttacagctggatcgatcataggctcttcacaacagatagggcactcgccactagactcggtttgaatctgccgaagagcatgggcagtgaacttgaccatcgttctagatgtttctcgagagtcggcattctcgttctctgccgtgaattggtcaatgagttcttgaagatccatgtcatctttgaactcattggttgcatcagccactaccgccgcactctcttcttctgcaacaatggctttgttgcgtgtcattatcgggtggcagcaggtctgacgaaggcggagaatttgagcgaagattgtgctgtaagacttcaataatgtgccagccacgacgttgtcattatatgttcgtttcgctcgggtaaatatgcagtcgtaaatttctcgttcttgctgagataactccacctcttcaatagtgactgtctttttgggcaaagggaccagtgggtcaccctccggagttttcatcgatttagttcgccgaagaacaagaggttccagtacactttgcacgacattcagggcccgcacgtattctttggattcgaatggcacggtgataaacgtcttccagaaggagaaattgctccatggctccactttgaggaaacgcaccaggctgaagagatcctcaaggcgattgacaatgggtgtgccagtcagtgcccaccggtgagctgcttttaactcataacatgatttagcagatttggaacgacggttcttgatcacatgagcctcatcaagaattactcggaagaattccacagagaatagacccccgtttgcacggaggcccggagcagacgactggagaccgagctggcggaattccgacaataccacaccataactagtgacaatcacctgtggagctgtttcatgattggattcgcagcataaatatttcaaattgacagccttgtccgacccgtaataaacaagaactctcaacgtcccagctttgagtgcctcgctttcccattgagagattaaggatgttggtgcgactaccagagtggtgtacggtgcatgcaccaccccagaggagattggcatcatagcaaggtcgttcaccgagctaataccattcgaaacctgtggatcaggctcaactttgtgagaatggaccagactgagcatctcaatggtttttcccagacccatttcatcggccaggattccccctcggcagtgttgctcttgagcaggaaagtcaacactgagatctcccgaatatgggttgacatagaaatggtcgatgtttttaacctgcggtaaatctttgtcgtcaacatccttcctgggccaaatgtattcctcccacaatggatgcattgacttctctcgagtctgcttcgagtctttctcttttgatatcatccaatgaagggcttgttgctggtacttgcgcagatcaagggtgaagctaggtgctggatctgccgctggcatgttgaaatcgaaagattgagctttttgatacaacgtatcgagctgaccttcttccagttcttcgctgtcgtctccgcctgatgagtcgttggcatccttatttgatttgttcttcacgttgtcatattgttctgcaatttcagcggcacgcaaaatgccatctcttttgtgcttttccgtagtcgggttggtcgaggtaggatgaagattgatttcctgaaacaacttcactagaccgacttggcgtagtcgcagattcttctcctcggtgctctccttctcttcaaacagtccagtggatcggttgtcatcagtgttaagagcattgagcgccgcgctttgaaaggcttcctttcgcaagtagactcggagttgtagatatatggtatcgttgactcgcaccttgtcgggtacaaacacacagaccccctcaaaccgacagatcttctgatcaatcagcgtagaaacccattcagcggtctcatgtggcagccttccaatttcttgccccgaggtattcgtgaatcgagtcaaaacatcgcttttgtgattgacaaatgctctgcctgttcggttgcgtttcatagttggctgcgagcgtgcgcgttcaatatggacagtgtctccatgcttgagaaatccgaagccacttctcgttgcccatcctcccacaccaaatgcgccaatataccttgctggtggctgatttggcagtaccgattcacttccaacgggtgtaccagggctaggctgtacacaaagatggggtttccggcttctggccggaacgctgccattgatccgtacaggcttcttccatgatccatcaaagtatatgttaacagctcgctcgatgttattggaagcagccgattgaatagttttgattgaatcggcaggtagttgctctcctacgatactagtgaaaaggtcgacatcgaagccatctgtgatcgtgtttgtggtgttgaccgttacttcctcgcattgttggtctaatccattatggtgtggagagggagtaggcccagcatccgcaatgggtgaccctaggctttccgtcgatcggacttgtgtatggtgctgatctgtttcgttttgcaaactaaaagggctttttggaatgcgttcgattgacggaatctcgtgtttcgggcaatgaggtagggacgcgtctgtatcttggggtttggtgggtaacggtgaggatggagagtcagcgaagaaacgctgtctctttgctgggggttgctctacatcctcgctcatattggctgtacatcgagcttcgtgaggaagaaaaaaggtgggctcggaggagacgcgccgagagacgcggcgagaaacgcggagagtacggcagccgaaatgggccaaattacagtccagcggatcgacgtcagtccctaagggaaaatgttcatggatttgatatctgcactgttcaagacatacgaattctctttctttgaatttctttaatttacgccggtttactatgattctctaatataattctcttattctccaattctgaggtggccagggtatcgctgacaaagattggccggccaatgcctttgccccgattacatcgaatcttttccccagagcttgtcgacatcacattgagcatgtcttttctcaggacagctcggccatgccaggcaaatagagcctgcagtttttatctgcaaagcgtccaatcccaaaaacgacactttagccggacacaatctatttccgcacctattaccgcagaacaagtccaaggcgctcacaaatattgcgttgctcttctctcgtatgaacaccttccttatggtcaccaaagcctactgaagctcccatggaaaattattcagaagctaacataattatctttccacagaaaatatgaccgcccctcctacacactgagtaccttcatcccacgacatgcgcaatccttctatattgcgctgcgcgcattaaacgtctccctctccatgatacccgacaccacctcctctcccacaatcggactgatgcgacttcaattctggcgcgactcagtaacgaagatccttgccggcacaccacccaaagaacccgtcgctatcttgcttgcatccgccatctctgaactccacgagcgcacgcagggccgcgcgcacataagcaagggttggctgacccgtataattaactcgcgggagcgaaccctaacaaatgacccatacccaaatatcgccgcgctggagtcctacgccgagaatacatactcgacactaatgtacctcactttgtcggcattgcccatggcctcgataactgcagatcatgttgcatctcatattggaaaggcagtggggattgcggctgtgttacgtggactgccgtttgttgcgttccctacgccacctgctcaagcgcctcctggggctgcgggttccgcgctaggagggggtgcgaaacaaggagccgtaatgttgcctctagatgttatggcacaagctggtgttaaagaggaggatgtccttcgatatggagctcaagcagagggtctccgggatgcagtcttcactgttgcgacacgggcaagtgatcatttgattactgcgcagcagatgttgaacaacctccgcgccggggaggatgtcggccatgactttgagcatgaaggcgaagagggtcatgaatacgacctttcccctagtgctcggagcagcgagtcaccactcgaagaggtcaaccgggcatttggcgttttcttaccggcggtcggcacgcgcatgtggctggatcgccttgaaaagcaagactttgatgttttcagcccggatttgcttcggtcagactggagacttccgtggaaggcttattcggcctatcgacggaagtctctggaataatggcatgtaggccatgtataatatgtgtaatatactacttcaggttttggaccgttgatgacttcttttgtatatgaggaatgttaaaactgttaccacgatgcaatgttgaacagtgaaatatacatacactgatctctgaaatcatactatcaacaaatgagttctaaatactgtccaagtgaaaagtatctgtacaaaacctgagaaggtctgagcaataaaatgtatcaaaatcaagcaaaccccgcacgcggcaacgcctttatacaatgattgggacagcgagctgtaggacgttcatgatctatttcttcgtcctctctcgtctctgcttcctcgagctaacaatcaaacgtcgctgagcaagcatgacagcgtagcgttgtattttgtcgcgcctaaagatgcaggttagtgtcggctgttttcgagaggaatatcagaactcacatcaggtagaaaatcgtaacgaggacgaacggcactgcaatcttccagaaatatcttctaaagtcagcaacaagtctagaagaaaggggtcgaaagacatacccttcactgtgttcgattcccgcgaaatgcgtgaagttcattccgaaataaccctaaaaatgttagaggattttcttcatagtttcaagtcatacatactgtcaagaatgtcataggaagataaagacaagtcacaagagtaagctgcttcatactttcgttctggtaggcacctgcacaggatattagtccgttgtttttctcttgaattatccatagaagttgaacgtaccaatagtgttgaaaatgaggtcaatcatgttatcagcgttgcgccgcatctgatcgtacccttcaacgatagtaatgcaatgatctagggcatcgcccaaatatgtatggcacatagagctgatcgtaacacctgtgcctccgacactcttcagatttggcggtacagtcccaatatgtgggcggggatcaagaaattctgcaggagttgcacctgggctaaggggattccttaggacaccaaagcctggtgtgccgacgggctcagaccggtgatcacggagagcgttaatcacagccactataggctgcatatggttccgcagaacagcaatctcagatgtcaaaatatataaggactttgactgttcaatgtctggatcagtcagaacctccagctcgaggtctccgatggcgtcttgataagccatcgttactggaatcgcaagatcaatcacagcatccagaatggcctgcaaaagcatactggcatcgcatgactgtcgaaggatagtctctggcgtattgaggcgcctgacaattggcgactcgatgtcatccgcgctcgtttcaaaaaaggaggtcacctcattatcggtatgtaggaagatcgaaacttgttccaaagtgacacataatcctttggcagaaagtgcagcatggcgttccatgaactcaattcgatcttcattcggaccaccgcgatatcgctgaagactcctggcagatgtgtctgtggtggccccaacatttccaaaatgggaattttgtgttgaattttgtccaagcccaggacgaacgctcgatccatatttcgccatatccttgcgctcctgttttgtggaggatctgaacctgaaaatgtccttcaatgccgccataataacactccacttcgtgggtcgcctcaacgaaatcgagctcttgtcactgaccacagaacttttccggtcccttgacttccatggactgactggattttcctcctcatcttccgaatcagaggagtcctcttcttgtatcttcaccaacttttgcaatgtcagtacaacgaaggcatggtccgagtaccaatccactttcgtgcggttagtgtcatggacaacatcctcaattgcaagccgatgcaatctcttatgatttccaagaatcttgatcacatcccagctcaacccattgacattgatccaccggcattgcacccagggctctttctcccgctgcaaaaattgctccagtgtgtcattgtctaactcatactgtcgcatttcatgttgtgagaagtccaccacggtgatctggcagcgtcgttgtaggtccgctggtatgttggacgaccattctgacgtgtatggcggtagcggcttggttgggtcaatgccgggttcggttcctggttgccaattgggatcttgtgcgaatccttcggggtggtatgagcgggcggtattgcgtctggctcggcgttttgtcgtctcggtggagttcactcgtgctgctgtggtgaatgcgggagacgcggctccctctctctctcctactgttggagcgacttgggaactgactgacgggcgacccgcctcaacatcgacctcgggtcgtgtcggaccctgctgtgcataatcgactgagtgtatgctcatcttcacggtttatatagatgtgcacatctaatcgtgacggtggaatgacgggttctcatcggctccggacttcgatatgctgcggctcaatgatgtgaacccggcccaggggttggtcaatgcctggtgggtatatacccaggatatttgtacaattggtgcacctctcatcgagacaccacttcgggggagaacatgttgatgcgtgcgggatatgaatgacgtcgaagagccgttttctgccgcgtcctacagagatagttaagacaaaaccggtcaaatggaaagactgaattttaacatgaaagataacaaagacgagaaaatcgaaggaacgaaagaaaagaataaatagtaaacaggaaaaagaaagaaaaataatagaagacagggggtttcccgtacacagggggcggagcgccttattttattttaagggagaggatggacgggcacagccctataagacactctacttcatacgcgtccagcataggctatggagtacatatcaggactcttgacctcattgagatagattcgtacaagtacatataagtacacgggttccattccatcacatcacatcaccatgcaccatacagtaacgccgtcccaatgctggcttccaatcactccagatataacaacatccacaatagttaaacaagatagggaaagcagagcaataattacagtaaaaaaaggctgccaaagagaatataaaggtaatgagaggaagagaaggagggagacagcattatactcgggctattgcccgtggtttccagggaggacggtggagtccaatttgaggctgtttattcccatgaaaactaggccgggagccgtggaagtcgggatagaggcctgactccatgtccatcagaaccgcccgctggggctttgccgagctccaattggtagaagtacctttcggtttggtagaaggggtgcgaggagtaggagcgatgacactagcagctgcgcgcgtcttctccttgatgatatcgcgaagctctttgtcatctttggtgatttgagctttgatgaaatcaatgtcattggaagcttggaaagcggacatgaccgactcccgtggagtgtatgggtatttgtcgggatttggaggcgactggggtgtgatggacgggtccaagaaagcttcctgatccttgtctaggagctgagtaatatccagcgtttcaccatgcggaattttgtgaggatgagaaggggtcacacagtccatgtcgacttctttgcgaaggacatggtcaatgtcgacggcggagaagtaggcacatgattgggggaggtcatcaattcctacttgctgagagaataaggcacgagtccaaacgttggcaatctgcaaagccattgcagcgcgatacctatcctcatctttgacaaggtagcgaatttcatcgtgaacagtgatggccaagcgggcctgaatgttgaatcgtcggataagatagtccatgctaacgatcaagaggtgaagataatcgacacccgacgactgaatagcccaattgattcgggatgtcatgaagctgcctttattaatgaaacgtcgcatgagcgcctcagtgatcccagcacccaaagcaggggttctaggtcgttcctgatccgcaaactcttcgagtttattgaacacaaaggattcagtgccacctcgccaaaacggcgtctcactcaagaggcgacgtgaagtgcgcgttcccttagtctctttgtacaggttcttggcagtctcttgtgtctgcttttcagttagagacggattgaactggcgaagtaaagtagcggcgaacttgacgcctgccccgtagattcggccgtagttgaagaccttggcgtcattccgcgagattcccagaatcgacgcacttcgtgagtgaagatccgtcccctcagctttagacccttctaagcacatgaagccgattgcgtttcctccgtgaatctggaatggggcatctccgacaagacttgcaatccataattcctgggagtcgacatcggctccaacgaacgagtagcccggcggtgctttgatcatagcttttagctctgacccaacacggttggccttcgcattacttgcagtcaaccaagtattttccacggcgcgtcgagtgatggtccccattggaatgacttgaggcagaataaatccgatacgattatcgccggcttcacttttctctctgcctttttgcgcctgatcttcatagaccacgatttgacccttgattcgatcccgggcgctgatccaataagaacatgacgcattcatatccagcgcttgtttggcaagttcatactgagatgacaggatcccacgttcgaaatactgcatatacccttttccaagcggattggtacacctagcttgtgggccgtccttgtgggggattttgaagtatatggcttttctatcgtctcgcaactcggtgttcttttcctcggtcatatcgcacatgacgactggctgattctcatactgtttgatttgatcacgaggaacgcggaaagtccatccgtgcaggtccgaccaaacaagaggatagttgtcccaggaaagtttgagcagaattggcgcaatgcgagtccgcaccgtcaagttaatatcggcggcgttggaggtaaaaagatccttgtaccacttgggcattcctggtttcttttgcctcgctgccggccgaggtggatcacccttcttctttcctttggccattttgatctcctggccggaccagtccagctgttgtagccaaggatcaatcgtgtaaatgtctggttggtctttatacttcaatgcttcgtcgcatagtgctagtagtttactctggacatcgtccagccgcttatgatatgtttcctctgcgctggtaagatactcttcccatgactcattgactggtaaaatgacggaggataagtgtcgaagagcaccgaaactgacgggatgcgggcaagtctcgagaaaattggggaaaacttttcggtagacacggtgggtgatggcaacatcggcagcacaatagtcgagaagttcctccagtctggccacaatagagtcacgatcaagttcaccgaacagatctctctgcgccttatcgatagtgacatcacaatggaatttggccacatcacgcagggagttcaccgagcttcgcccaacccaaagctcctcctcttcttctctcaacatgttgttttcgagaagtgcggcaagctccacagaatcgtggtcattcgcgattttatctctcatgtcctgattctttttgtggcgcatccaagtcggtctctgttgcgaacacatgccgttgaccgccacatgtagggacattgtgtcgagaaagaagttttgagactgctgcatgttgtattcctcaaggactcgggctcggtcgtaaccaatattgtggccaaccacaatgcgagattgagtggggtctcccaagggtatcagctgtacttgattctctgactcgccaagcagccacggtgatatccatgcataccaagctgtcgggcttaccgcgcaagccatgaccgcaaatggattatctttgtacatgacctcggtgtcgaatgttaacattgattcatttggggcgtcgacaggttcagaggttccgtcagtgtggtatttcgtccatccgctgcgttggacccatttgcgtggtttggccggacaggtaagagccgcatatgacttagcccatgacaggtatggttcggaagaatccattccaagtttgtagaagtgttcgtccaacgtttgtcccttgagagcaggaagatcgaatgcgataggaccggcgccattttgagatttgcccaggagctcatgtcgagctaaatgatccttcgagagagcgactagttctgggtccggaacgcgacctttgttggggaaaacttgagcatggacatggtcgctgagctgttggactccgatgtcattgaatctggatgaggaagggactgcgcgagatcagtaattgcgatttgattgttttcttatcgagaagcgcaaaagacagggcacccaccagaaagagatcgtcttgtggtcacattgtcggcggaagtagagaataatcttgtatgacttctgtctgactggtagcacgatggcggcttaaccaggaacggcgagcttcgtcgcaagaaagattccacggcacccttggaacaaggagtgcaggagaacttccaagataacatcctaaataagaatttggcaagtttaggtcatgttagaagtgtggcgacagccgtaaggctgcactagtagcctgaaaaaaaatccgaaaaaaagaggtaattatgaagatggacgtagctaatttccatatcatcgcctatcgcagatccgggcgtcatgcaggtcggaatattgttttccctgtatgcttgaccgccttctcctcgtagacacttttcacgtgatgtgacgcagtagtatccggcggtcacccctccattgactcgctgaccgccttccatttatagatacacaatacgaagcgggcttatctgatcccctatcgccacatgacccagttgataagacccatatgctggccggcattgtcgccatcacctgctttgatcgctgaaaggcccgattttgccgacaaatttcttcttcttaaacccacggtcgctgcattttgtcttagcgaaatctcccaaactctgaggctgttcgtcggccaccaatcctagatcttttcacaccctctcccacacggcagcacagagccgcatacgactttccttctcatctccagactattgccctcgctcaaccttaacgcaaacctctttgaaagagtcttccttcccactctgttacaatgagcagaaacagggctgatgttgtcgacctgacaaccagatcatcacggcgaaatcctatctctttatcctcctccccgcctgccgccccggaccatgcaacctcttcccgacatggacagtttactactacccgcggtgtcaagcgtcgccgtaattggaacgatgagcatgacggctccttcgtatccccttcggctttctccgaaaatgagcccatcgaaacaatcgacatgaccgacgactcaggcgcggccgcactcgctcgaacagcggccaaacagagggaggatgctataaaagcgcaggcttcagcggagagtgattcaaacctttccgctctactttcttataaatgtcccatttgcatggaaacgcccgtggacgcaacgagtacctcgtgcggtatgttcttgattccctactatactggatttaagcatgctagggcttctactgactccttatctttaggacatctcttttgtcacaagtgcattatcgactgcttgaagatgagcgagcagacacgtggcggtgactcttcaaaacaacacaaggggacctgcccagtgtgccgcacaccgatttcgcgaaaggagatgccggggaagtctaagaatctcattccgttgttgtttctaacaaaaaagcgaagtgatcttcccgtatctggcccatagagcctttatacccgcttccttggtctcttcaaatctttgtttttctctcgactcttgcggcattgggaatcggagcatgggcatgggtggtatttttcagggttttgcataagcgttcacgagctgggattgacaaatggagttccaaatccatggattccattgattaatatggtgtgtagatgtagttgtacctcgaactattatagtacaatattaacttctaaacagacactattgcatatcctttcggtctcttcttgcaggatcaagtgtattccgtcgacccagcgcatttcccaatcccccacgaaccattgcatcccccttcttccccaataccacctcaatggcctgcacaagggcattggggtcatattgcatccccacaacggtctccttatctccatccctggccgtggtttttcgtccatagagacgaagcgtttcaatgcccatatgtgtgagccgctcacggtccacatgcggtgtccccggaccatccagatgcaagatatgggtcacatagttggtataaggaagggctctataatttcgaacattttcttgcaccgaagtagtcgctgagttgtgactttgatgctgagaatgaaaaatcggaccccgtccacggctctcctctccggcgcttacaattgcttccacaaaatcagacgcgacaaatggtgcggatggaggccctgtttcccgatccaatgatccgttcaaaatgaggattttgtgtcgggcgggactggagacgatgcttttgccgacgcctcgcaggatgatagcagggatgattgatgtgtagagagatccgatactgtagataatagcctgggagtcgtttattgcttcaagcactcgcggatttgcgggcggtcggatctcttggccgtaggggttgatgtaccagatgcgagtgattcgagaactcaaatcttcattctcggttttactgaatttgatattcttgttgcggagagttgccagagagccaggaagatgatcctcctcgtatattgtcgggtccgacatttcggaatccgtgtagtcatcgtcgccatcggcaaggagcagacttggtctcctggagctgggattgtgctcgagggccgtcgcctcgcttggatgcgagatactattctgaccgacaatcacagttccatccgcaagcgatgcagagatatggtgggagaaattggagttgattgctgggatcacgcgcaccagatctgacgggacgccgcatatgctcccgagtaggtagatggcactttcgaagcttccactgaacagccgggcggcagtcaagaaaagatttccgacacttgcggaggtaaagtcaaaggttgatgatggcggtcgggctcgtttcagaatttccagatttaatacattgaagaatgagcgtatcaactctttcttggcgggggtgatagctgtccatagcccagacgtgccgtccacgatggactgccattcattggttgcgctgcctgcttccgcagacagccgatggttaaacaatgccttgacagctgacctctcagggtttgtcaacgaatccggaatcaagcgtaccaatcgacctgtccgacaagttagcaaggggagatacgaagtgttgggcgtaagttgtactccgaacatcgccaatcccagggccaccgaatattcgaatcaactcggaagaggatcccccgttatcactgattgggatgatgtagctaagtgggcaattcttgttttcacggacggcgttgaatacatcgacgagattgtttgccgcgctccctcctgatatgacaacaatccctctattggtcgccatgggcagatatttgttctgtcgcttgtgtccaggtgataaatccgatggggagggacaaatgtcgagtgaatattcagaagagtgaaatttaagacattggggacatgtctgggcccgaacgcgcaacaatgacacatttccacagccacaacacaagaacggccaactttgcgcataaatagtttgagcgtttagaattgaaaacctcttttgtgaataattatcagattcaaatgggtctacaatacacgacttctagtctgagctatttatagagtcggttgactatggtatctctacataggtagccgttgatttcttcggtatagttgtagacataccaaggtcctatgtgccatattctcgaaatattttaatttgggctttgctacgagacaaacaatgttgtggaatgttcgtatcgaacaagatcgtcgacaaccattcagtatcttcaaccctatctttcctgtagaccgacgattccgtaaatttgatgatataagtccactaattccagactagacatgaggagtggttgcaaaaggctactttcatatcaatatccccctttaacctggcaagtgtatactgagatgtctatatctgtcgaataccaggctttgcacccacttgtatcacgatcgatgtagacgccgagaagaagctcgtccgaaagatcgatctctatttgatgccttcagtttttattctttacctgttttcctacatggtattttaatctatcatatcaattgccaactatattccgctaaaagtaccaggacagattgaatattggtcttgcaaaaatcgccggaatgaagaggatctgcacctcacatcaaatcaatactacactagtgtgggttattggctatactatctctggcgtaccatccaagtaagatgagagcctttgtgtcttccacatgaaaagcgctaagactagattcagcataattctctctcggactcgcttatcagttttccttccagtaatcacattcgcatggggatctattgcagccttaataggtgctgtccgtcatcaaagtcaactgatagctctgaggttccttcttggagtcttcgaagcagggtttagtgtgagtgactctatggatgttataaatccgcttttaaatttgataaagccagccgtgatcttcttaatttctacatggtatcgaaagaacgagcagtagattgcttatacaattatacaacagcacagccttgaatagcgcttactcgaagcagatcaaagcggttcattatcttcctaaccgcaggtatactcccaggagcattcgggggagtaatctcaggagctatcacatcgacattagatggcgcacacggtatccgtggctggagatggctcttcattgtcgaagggctcgcaactgccgggggaagcctgatcgtccactggactctactcgactaccgcacagcagtcgcgggctatcccccgaagaacgaaagctatcccaacagagactcctcgaagacggaatcgccgatcaaggcgactcgaaagaccagaacatctcgatcttcgtgcttttgttcaaagctctctcgaattggcaaacctgggtactgatcccgggctacatgaccatatcgggagctggggctatttcatacttctatccaacgttgattcacgagatggggtacacctctaccgccgcgcagtatatgacggctccgctctatattgcgtctctggctgcggctatccctatttcctggttggctgaccgcaaaccccatgctagggcacaactattgatgggagacatgatagtcgggatggtgtttttcgctcttatagcgggcattcgaaacaatactgcgcgatatttgtttttgtgcttcattagcatgactttttggacgggaagcgcgcttgctctttcgttttctcctacgtctctggcttcataactgttggagcgcggtaaaactaggcacaatgcttcgtcttatgctctcgaggggtcaaatgcttagtgtttgaacagacaaacaactaggcggtcaaatacatgagatcaaagtgtatattcaggtctggaatagtcaatttgtctggtctgatattcagtacaatctggggctttctttatagcaagcaaacattgcggatagctcggcaaatactgagatcaggttgatctcataactgactagatgatttcatgattttttgatcagatgaagtcatgacttttatcagatgagatgaaacagaataaatagtgcaaagtaagcaaacaatcaaatatagaacacaaattccaacacaccccttcagattttgaccttagtcaaaagctgcaattatgggatgaaaagctaacatagatcaaacattgtcaaactcagtcacccggttaggtaaccgtctcaaattcagctgattcaggaattcaacatgcttttgggacggaaggtgttttgtcaatccgtcggcgatcatattgtttgtctgaatccactggagatatatatctccatttcttaccttttctcgcaaccaatgttgattgatgtccacgtgacgtaattttgtctgatatgatgaattgggtttgatcatcagatcaatggtctgtttattgtcacatgatagtatcagatcgttttctgggtcaaattcaattgatctgagcaatcgtttcgtctaaagtaggtgctttgctgcctctgaaagggcaacaagttctgcttcggttgttgatgtggtaacaattcgttgttttcttgctgaccaatcaattagaccaccgaaaagggtgaaaatgaagccttgagagctttttcgtccaatgttatctgcaaaactggcgtctgatgctgcgcgaaagacgtatttaggatcacatgacccgtcgaattcaattgaatgatatctcgtcccataaaggtacgatattgtttgttctgcagcgatcacgtggcttctttctggcttagtaagccattgaaaaaggatctgatgtgcaaatgcaatatctgggcgtgtcattattgcagcaaaaccaattgatcctaccaatgatcggttactcgtgatgttcgtgcgatcatgctcgcgtggatatttgccgtcggggctgtttgttatggcctggtaggtattttgttcaagcgttatccatgaaagtaatatgataactgcgaagatgtctaccttgagacattgaattgcaatcctcatacgcaatggaatagcaggactagatatatagttgacacaacatatcaatttcatacagccgtttattataaatcctatccccaatgaaaacagctaaatatcgtctatgtcctctacctgtacatgcatgttctgtcctgtccagacaagacaagacacaatctttatcaaaatttaacataagcatcggaataatttacccgagcttggattcgtgaaacaataggtccacgcggaatgtgctccgggtattccaaatttccatcgattgcttcagttcgccaacgtatgcgatttcgtgcttagtgagtcacctgagcagcagcagcgggggcggaagagctaccactgtagaggacaagcagaatgagaacgcaaggcacaccgatgaggacggccttggtgcgggcagggttgctgcggttgtactcaccaacctggaggcgcacatcggtaacaaggctctggcacttctcagcaccgagcttgtagtacaccagaccagccagggcaatagagtaaccgaagaactgctgagcagtgacggggtcgcggaaaatgaacatggaggctccgaccaggaggatatccttgaggataccggccatggtcaggacaacagcagaagtcttgccaatctattggtgtgttagaagtagttactatctgtgggatgaaatgacttaccagcaaaacaacagaggcgttaagaaggaaagcaaccagtgcgttggcaatgagagttccgataccgagaccgtagatatcacccatggtaagacggggagcctcagcgaaaagggtgacgacaccgttagtgatggcgcaggccggggcgtagtagtagagagagaccaaggggtccatcttgaactcagcggaactgagcaaacgctggaccatgacaagacgaagagcctcgaagacaataccggcaatctggactgtaaggttgttaggactagaatgtcaaatatatgagtaggacatataacatactgaggaagccgaccatttcgaacttgatctcgccgaacgaggcaatcacaacaccgacaacaatgagagccacgttgccgagagtcttcaagttggtaggagcgattccgaaagcccaggtggccaacagggttgcaacagcgttggtagcctagagaatattagcattgagtcgaacctagcgtttaagagtgggcggagatcgcaattgacgcaattgaggtcaacccccggttcaaacgcaccttaagcatctggatgaaggaaacactcaggtagaggtatgccaagttaccgcagatcagactcaaactgaacatgataccgataggcacaatggcacgtctgcattgcacaaattcaccggttagcgatcgagcattccggtcggactgcggccgtcctagctatttcatatcttatcggagttgctcacgtataggtggccgggttcatagggaccttgtggcgggagtcaagcacggtagtgaaccgggcgaggatctgggtcatcgccgtggcgaacaccatgtgccaggtggtcaagaagagcgctggtggctcatgtcagtaattgattcctccgggtgcggttgaaactcgattggcggatggactcacggaagtctagaatcaatagcggttagctgcacagtccatcatgaataggggatcagagataaggggtccatactgaacttggcactcgcaaggacccatttgttgaataggatgacgctggaactcagagcaatccacaggctagagagtcgagtcttagtttcatacccgacgaggccttcacgtagatgttacgtacgcaatgtagaagccggggtggaggccgttgtccttgggggcaggagcaccgccctccagcttacgctcatcctgcgacgagcgaccgtttgccatgatgaaagttaaaaaaacagtataaaagaatgactgtggtgagtaggaaaaaaaagaggtggttagaagggaagataaggggaagaaatgatttatgaacgatcggcagttgaccctatggagacgctccagcgcgcacttccaatcacaacgtcggtctaacaggtgtgtcgccccagtgtttacacgtaatccccaagccctgtcgagctgagtcctctaagagggttccagggttattggggatcgagatttttccggtttatccctgtcgatcatagcacagcccacctcgaagtcttcttttcttgtctagcgtatcacgtctgtatgaggccaattagggtgatttaaagtcgattgccaagaacacagggggaagatgtagtgagacaacgacaaaggaaaccaatcacattgaaatgtgcaaattatactcggtacatatcgatagagtctattgctgtatgttgaactccgtacaatctaagacataatgtacgacgtacggcgtaggacatcctgacatctgatgctgtagagtacgttgcacttacacgatcacgtgacagggatagatagattttccgcgtccacatcattcattacctaagacatctcctccgaggttacggatgttccgataaacaattgtacagacatcgtcacttccaacatgccagagtcaaacgtcgcggcggattccaaaatcgaccatgctgcctccttaaaatactggaacagcgtgccagccaccacggccagcatgctgggcgagttcccttcagtgtcacgcattgatctacaggggtctaaaactttcctagccaaggtccgccgtttactacccaaagtccagtctgaaggcaaactccaccggggtgtggactgtggcgctggcgtcggccgggtaacagagggcttcctgagccacgtctgtgaagtggtagatgcggtagagccggtagccaagttcacacaagtgatgaaagacagccaattgaaacgagacggcgtcattggaaacatctacacgcgtggccttcaagactggatcccagagaagaaatacgatttgatctgggtccagtggtgtgcgggccacctcaccgattcacagctcattgactctaccgtgcggtgtcgcaaggcattgactgaaaacggcctgatggtcttcaaagagaacttgtccactcatttctccaaagaagatatgtacgacagtgaggatagcagtgtcacgaggaccgatgcgaaattcagacaggtcttcgaggcggctggcatggaggttgtcaagtcggaactccagaagggcttcccaccgtctttcaacctcttgcctgtgcagttctacgccttgcggccgaagacgaccaattagccctcgatgccttgtgtctatcatttgatccttgagagtccatgatgcaatattggtatctacggattcattattacttatcgaacgagtaattctttgcatgcttgcaaaaacctggaatttccgctctgaaatgcgtagattcatatccttcaatcgcccaattcgcatggaccgttatgtacataataaccactttcttcgacggccatggtcgtgtgagaccaaatcaaaattcatacagagcgtctgaatccgctacagaaaagggagaaaccttaagtcgtccaccagaaaccacatccctattcaatttctccggtggagtccacacaacctccgcaacatttgttcgcggccgagacacaccacacccagtatcatctctatgatgaaccaacaacaagtctggccgacacccctgtttcacacataaacccgaataggacgcgagcccgatagccgccctggctcgtgtcgagacacattcatagagtagctcagcatccgcctgacttccagcctggtagattcccacgcccaggcaagccaacgataacggatcgggcaaaccccatggcgtaaatgaattaccaacattgttcaccccaatcactgcatccagatcatatttccggatcatctctaggacctgtagagtgcctctcggacgatcttgcggaggcttgcagtctccgctcgttctgggaggtgacgccatgtacatatcgcttgttggcagacccacgaagctgactgaaagttcattctcgtggatttcagttgccagtcggacccattcggtctccgtgagtagtgtcagtcgtgtacaatgaccaagcatgacacgcttgtctgttgagtggatagtccagcttcgttgtttgagggtctgtaagacatgccagaccagagcctctttctttgaatcgaggttgtaatcgagatgaaagtcgacgtgtttgttcagcttcaaggcacgatcaattgcccattcgatgttttgcttcgcagcctcagggctagattcgacatatggtgttgtcccaataacatcgatttgcgaatatttatgaagagcggtttccagaaattccatattttgctctccgtattcactagagaatataggatcttgtgcaaaacagacgatttggatatcgcaagaatctttccattggtttttcaaagcaacagcggcttctagacaaatcagctgcactgtatggtctacctccacaaatgctctcattgcagtaacacccgacgcaacggactcagcaagaagccactctcctcttctaatgatatcagaatggctgaattgttgtttggccttggtcgtggaggacaaagcctcctgaaatgtgccggctgtaggtagaaatggggcatattcaggtgcgctgtggataaaagctttgttaaggtgaatgtgagggtgtaccaacgctgggagggctagaggagactcgaaatcatccttagtagaggattcatgcggggtcacagaggtgactgtgcctcgaagagagtctctagggtatccaatctggatatcccaggtggacggctctcctgccagtcgaacaccacgaatataattaatctggctcgttagtcgtggcggagacatattcttgtgcaagtgaagtgttgtctgagttgaacgctttcccgaaatcccccgcagcgcgtggggtttacgggcttactgataacacaccgtggacttctttgaaatgacaatatattcaacaggcttaaaatggtagtctcgatgatcttcggcacatttaaacccacaaatatacatgcaaatgcgaatcaacaaaatactatatttacccaagtatagaccgagggactctctactaagctccccgaactaatactcgcactttctggcggattgtcttcaacatgctgacgactgtatccgcggtctcgcaatactgcgcccatggttcaacgcattgaattgcttccttcactagctcatcgaagtccggaacaaggggctctaaagccggcgtggttttcgcagtcgagagagtaaaaatggcagccaaaattctagatgtggaaagtaagtaaacttcgcctactggaccaccttggaccggaagatatgatcttacgcttgcattcgatgccagtttgagtgtgttctctgcatcataagaagcgatgccgcccagatgaatttgcgacagctatcaacgcacttcttgcaattcgcgaaaataaattctggcaatactgtactgccctggctgtgggcagcaaaaacaaggctcggacggcagatgatgtgttttgtggcatagtaccgggcgagaatgtaagtgtcgtaagggtgatctgcggatattgaattgcccagggttggcctgatggggtttgggagcgagccaaaccagtcctccaattgacgatcgagctcctcgctgattgtcttaagagatgtaatcgactgcttttggggagtcacactgggggtgtcacttgtgtgttggggcggagggctggtatggaaattagcctgatcgggttttgcatatagagcactgtgcacgcggttgagaagctttcgaatcgagcacatggcgaggaatacaagatggccgtttcggctatcttctgaaattcgaggaaagggcaatctatccacgaggacttcaataccactgggagggaaattaaattcggcgagatcgtcactgggcatagtttgttagctgaatgcaagataatgccagatagtatactaaccattcgagaatgaagcaggcccaagctatccgatagagactcgctcgctcttcgtgtgtgttcatgtcatgcagtctatatccaatccgtgtcaatatcctagcgggaaaatatatcagaaaagacactcactcagatatcatgatctgcacactaccagatgcttcacgaatcatttcccatgcttggattgggcgtcctatgtagcgcagatacaacgagccgtagaataaagctaaaggcaacaaatggtccgctgcaaaggacgttatcaatgggctgttcaagtagtgatatgcggaagcgaaatattccatcccactcaaatccttgtccgcttcaatatcaaaaatccgttgaggattcgtagagacctttccgagagccagaatcacgagataaagtgaagtttggatactgttgaccttggtgtacgttgagaaagtgtcaaaaagcatttgtaacagctgcggctcgacaatcgggaagaatgcatggacatgatggaggaactcggtgattagaggtttggtgacctgaggatgcagtcgggatacgtcgatttgttcaaaagcttgaggtatgcctgcggcctggatactgttgaatggtcgctttttctctatctgcttgaaaaagtcttgagggtagtcgccaaccaaatttttgactcgatccaacgcaaataggctcccggttggcgtatgatgaccgaaaggaatggtaaatgcatattcagagccgtaggtgttctccggtgaaaacaggccgaaggaggatttatcgtatacatgctccggtgatgggtcccagtcgtatttaggctgtgaggcatagatagaggaacttgaccgacccggatgatccgacgaagcgcctactcgggctgcgagctcggtgatggcgtccttctgttgctcgatcagggtttccagatgggtcaagcgaagcaggatttcagcggggatatcttgcaccctgtgaatcgtcactatctaggaacccttttcatcgaggtgacgctttctacctgtcgctttcttgatagacacactgagcccccgcatcggtgcagaggccacatgtcggcttctgcccatcgcacttccgtttcctagtatacgttagtgacggtccaaagcgaggaattaaaagcctaccgatgccgacagaaattacatgcgattgatgcacgcttccgtggatagtcgacgggagggcgagattcaaacgatttcatatttgctttgtgagcaatacggaagatcgacgtcaaatgctcactgcggggtcgtcagcaaacgccaaaacttagccccttaataatcaaacgtgcctagtttcatctgggcgccaaaaacaaaacgaagtgagaaattatattcatttaccgataagattttactcctgctagttgaagcaatcgatctgtgtgctctggcacttccagcggtatatatcgattgcgggggtcgaccttaccatctgggagatgcaccactccatcgcggatcactatgttctcatggggccaatgagttgttgctcggtaagaggcgaaagcttctttctttcgtttcaggctctcttccgtggctagctcaaagggggcgtaggatgcataaatcaccgttcggatcgtattgctgttgacggtgggttccccaccccaatgcaccgtacgtgaatcccacacgattaaatctcccggctccgcaagcaccttggatggtttcataccatgagactcaaaccactggatttcttccgcgctgaacaggcgcaggtccttctgctcccaggtggatggatcggtctcggtgtcgaagaactcctcggttactgtgtttgaccgcggaaacaccataagggatccatcctcgggacccgcatggcttaaattgataattccctgaatacagtggagcccgcgacgcattggcgactgatccacgtggggccatggtttttgagcaggcttgtcttctcggttgggcagagtgatgttcagcgcgtcaaacgagacgaggagctcatcggtaccccagatcttggaaaatgcctccagtacctttggctccatgcgagcatcccacatgaatttctcatgggtgactgaatatccattgaacgtattcactttgctttggaccggtaagttgtcattggtccacgtggaaggatcatcaaggtcgagggttgtgctgaaagatgtaagccagtccagagctttgcgctgatagtcctgggccttttttgggtcgatggcattcttaatgatcgcatagccttcattgtgaaggtcgtctctccaatcgccatatgggccacttagcctagcgtcctcaattagaaactgcctgctcaggagaaaatatagtcaactcactcaaacgaagactgattgagagatggagtagtggtagtgacagtggtcatggctgtttctccaaacagaacaagctttagtctgaacaggaatgtacaaaataacgggagcgtagctttaagtatgcgagattaatatcccaatgtgatacatcatcaatttaaagccagcacatgtggaaattcgcaatatgaagtccaatctgatggcctccttcggcgggtaagcgggtcgaccccgccaaagtcgcaagagcggaggtctcgcagacggtctaatcgccatcccacctcattctgagccaatcagccatgcaaatgaaatcaacagaaacgtcacgggttgggctcaaaagactccaaggatgacgtctcaaactatttctccacacaaatatgcctattatgtcgcggtcgctctatactcgggcccgctcaaggttgaaaaattctctaatcaaaggggtttgcccaggtgaacaaggccaaggtcaagtctcgaagcacttgcatatagaaatcgccagtaacacatcgaaataggccatgtagacggtttgcgctacaaatgcagcaaccaaaagaggcagtaaccaaaagaggcctcatgcagaagaaaacagatcccggatatattatccagtgggtcactaaccactactctcttttctgcttccatgccaatctaaatccaagccacgggacactgaaagctttctctagggtatattgcgagcagtgacccatctaatgcttacaaatctccagactcaaacacaggttcgttatgcttcacagacctgacactgcgttcttaagctcaagtatgtaggcttctgcctcttccatactcgttgggccgactacatcttgattcggtgcatccggcgagtttgctgaacctgtgaagtacacgattcataatcttcaatgtgatgttttgctgcctcgattgtaaggccactaatatcagcatctcgcaatttccgtctgcataaattggactccctccatctgaagaagaatgtccgctagctatcgcctctatccgagaagtcatggctctatgcaccaacagtacacgggaacgtatcctggctggtctcggctcttccacttcgactgtcgatttctcccagcgacccctgctgaatgtcagtgaccatccaaccgcccaacagcccccctcgaaacataagcacgcgtaatgtttggcccaggtgtggatgcgtggccgtggaattggcttcctcggcaagtgcttggctcctacctctgcttagccatgaggaattgcaaagactgtgtcagggcttggttttagactgtgagctgtcaatatattgctgaatccgtgtttggttgatggataatactcccttcatcaccaaggttgcaaatgccgaaatgagatgcaggcttgcagcgccaatatagaatagctcaagatggctggcaattgtcaacatcctccagcggaatctctctctttctcccgcataccagatatgattcattgttaccgtgtttctaaccttggcgcctgtccctcattggcatcggtcacgatataactcgtacagtgctgaacaatcccatatgtccaatgactggggtggtgtgctagttgaagagagggacgaacaggatgttcttccaaatctgattgtaatggcatttattcttgtatgccactacctgtatatcatatgatataggaccatcagggaaggtgcgatggagagtgtctattttgggaaggcacgtgggttgggaatataaaagggcccctccccccatttctcttcttctcttcttcctctctcctccacatctctctagccaccatctcaccgtagcccccacgagacagcgtcggcagaggatgccgtagcacatgctgcttcatctaccacagggaccatgacattaccatatgcacgaggtccatgtaggtctgcatcaaacatcaaactgggctttctcgtggacgttcctgaagtcgtggctctcattaccacttgacgagtcccacggaatacattaggggtgtaaatcttcgtagccgagactcgaaggtagtcacggcaatgaccgacgcttccaaccttacggtttcttttttgtgtatctaacagaccgacgatgaaggttgtaccattctccattgtttccccatgccactaccccagttgcactacccgtcgtcgcgccgtcgctcagctcggcgttactgttcttcccaacaccatcatcagtcgaagggtcgcgcatcttatcgatcaaaatctccatatagccacaactcggtcactctcactatgaatgcggaggatcgtgtgttgccagactctacctctgatcctattatcgattctatggagctggtgacttggaaagtgatagtctgctgggttggattgctattgctgtcaatactacataacccctgttaacatggctctctttttaggcccagcagcgaaagaaatgattgtgtacgctccagacctaacacctgcgctactgagactggcgacggcgcgtccaacaattagggccggcgagttcggggcgaacaacccattctctccatcccaattcccttccaaacagtctatatcgatttcgtcaccggcctgccagtctcccaccagagcttcaacccagtcgccttcattacatacaaattcacgaaacggctcagagcaatgaccggcaagaccacttggtcaagtaaggactgggccctggacgctcgcatacctacagatcgcagaactccttttctgtatctgcctcgacagtcggtgatgcgcacagtttccttccatgatccgggaacggtgccacacagagtatgattgatgccgtctctctggcagcttgtttgcagaatgctgggaaagagaatgtgccctgggcaactcgtgttcataacaagcttagatcggccactatctggcatggcaaagatatgtctaaggtaccatgacaagatactcatccatcaaaatcaacttgtgtgtacggagtacacgatcaatgaacgaatatgatacttgtatgatacatgtgagtataaggggtgttgctattcggaccgacctgcaaaccccggccagggtgacgatcgcggacttcggacttacagtgtaaactccgaaatcagccctagagtgccccgagcttattggacttaagatgcaagtcttaatggccacattccatggtcacgttgacggaagccgctatttcccagaccagtctttttggcattcttctaaaacaaggcacactgattgtattggggtcgcgttcccccagcagacggagccttacctccagctagagcgatacgtcaaccaaatatctccattaacgactcccctgccggaggccaacaagcgcgagacgagcccaaaagcaacacattatctcgagcctggaaaggaaagcaggacgtcaactttaacgaacagtccactaggacatcttcgatttgcacgacacgccgaaagtcagaagtacgagaatctttcgagtcgagcatatttttaaaggggcttgaatggaagctattattttgttcagtcacgaaataatctcaaaggaggacaaggcctgtaacgagactctgctgccgcaatttcagcgctgcaatgattgtatgtcccgtcccgtctttcgtctcagagtcggagcgatgtgggccgagtacgtgtcagaatatcaccactgtttgctgtcccctcgggtgtgagtctagttttggcatagatcgaccacatggctattgccgctatgccacctcgtaaatgttaacacaggtcacaagtaactagctaggtaggtatatacagataggctcaatatctatactgactgaatgatttaatgcgtattctaaactgtggacaatacaatctaacgttctttctctctactttgtagcacctgtgaacgaagttaattcgtatccgtgtcaggtggatcgggaaaaccaagcagaaaaagaagaaccaaacttacctaggaacttcttgatatcgccatatatggcgaattggcccgcagtgaggccaccaaccatgaacagacgcgtcgggagaccagcaaaagatccacgcagacccagctcaccagcaatcttgatcagccgagagacagtactctcaccaggcagacccttcgtcttgttgatcttagacaacatggtatcagcgggctgagacacgatggcagccgcgaaaccgctcagcagaccagatcccaaattcacagcggtcgaggcaccagctgacatttgagacttgtcaaattggctcaggatggcctctgaaatcttttcgaaagcgacgaacttggttattgtgtaaggaaccctatacatatgttagttgtagcttttcgtcatgttgttttcaccaaactataagggagtcttggatcgaatgaacgtactgcttgaaaaggataggaccaaagcccgagtaaagagcgccgacaccctcattcttcacgatcttcccgaaaccatcgatcagaccattagcaaagccgggtgtcgagacaaggcgaatacgtgttgcttccaggggacacagcgcaaccgaggcgaagaactcagcgcaaccagctgaaacaacgtaaacagcagtgttattctgcttggccttttccgcaccgagaacatcgatagatttctgctggaagaattcataaccgccgaatttgaaggcgccttgcatgaaatatcctgcaaaggtcggcccgaagcccgttgcaagaacgctgatgccttcattacggatgacctgtcggaaactaccaatcataccacggttgtaggtgagagggtcgagctggatccttgtcttaacactatgcggaaattcttcattttagtcgatgttggtgatggagctgaagctagagctggagtgagaagcaattgagagcacgtacacgtcgaccggagtaaaggcaccatgggtgacggagcagcccagtgcaccggcaagggcaaagcgagcatagaggttgatgccctccggcttgctattcgtgagctggggtgtggaaacaggagtggcagccattgtgatggtcgtgataatgaatgcgtggattaagcgaccagaagggtcttaggattatatataaaatgataatggcgggccacttgtccgcaagcctttgttatccctacctactgtctcgggtttaacgctattaaccccgttatttccagatgtccaatgctaagccgaccaccaatatcagttgcaaccttccttctcgcatacttgcagtaagatgacttgtttcttgttgtaactgatttttcacgcatcctttttctgttctctatctaggtacgcattatctcttcgcatttattaggtatctatcgtgctctgtactccgtaccctttataggtttagcgagacgtaaaccccgtctgattgcttcggcatagaggtatctacctcacaattttcatgccaatttcagttagcagatgtaggctgcggtaggccatgtcatcgaggcagccctgggggagtttcccaggcgctgggtcgcttctgcaaggttacgggccgtgccggtagacccgcagcagtgggtggggcagcccgatatcattgttgtcggtactcgagtttatggcaaatgcatatggccactatcaagtcaatagcaatccctcattttgagagagagagttcctttgcctcaaaccatttcatgtacttttcttttcccttcattatatatcccttcttcaacacttccattcacatcttccaactcattccgtcatctttggcctcgtctcactcttaaattacattcattgattgctatatattgggatcacttgaccttgtctatcaagactaccatatcttcctttctacctgtctatggtattgctcgctctttctttatcactatgatatgaacagaattccatgctgtcacaagcttagcttagtcatagcttcgtagcttccagcacccccaccaaggaggtcaagcttactgctacatttctggtagcaggtccaaccacggtagtcagcgacaacgccagaccaccacacaagccgaggcgcaacctaacaacgcaatcagcatcagctcttccttaccgtcttctttaccgggcactcctgaggcacaaagccaagttcacggagcggtagcgcaaaaccaggttcaccaagccgatagcgagggaaaaatcccccgggattttgtcgtcccctacaaaagcattatggaaaacctggaccgcatagggccagaaatcgacgatttgagacggctatacaagcacatgtctacatactgccagctccaacttcaatagactgccctaacggaaaaaattgaagccgttgccgccgccacacgcattacaatctctaaagagctcaacaagctgcccgatattcaggaccgagctatggaatgctgggaacaccttttccacctgcctttcaaagctggaactccgcattttccctcccaagctgaaaccccgcaagactataaagatcaagatgagatagcgtcagtcatcaaggagaagtcaccacaagcctcagcggaaacttctagattgctcaaaactatcaaattacagttccatattaatcaggactcagcaagcatgaaattacttattggcaatgtactacgagaatcagagtggagacgattcaagtaacctactcggaatccctagtttctgccttgaggcttgaagaatcagtacatattacatgcaaaacctatttttcttcaatagatgatacgttaatctctatgctctcatctttattcaattttgtttgttattccctcaatacttgcttgctttagctacacttccatcttcgtctgcaatgacccaactactcactggcttctcatgtttgaatctgattgaggctattgcagctattgaccctattgacaataatattgtataaaatcactttcacctctcatgtacctccatttttatcagctcgctcatttattgttcaattgcaatatcttcctcgagacaccatgcctattcataatgtggccattcaatcgaagaactgtataaattccatgaagctcctgaccaacctatttttttcttcttctctatcatcaacgatgaccccaactcgctctcgacgaactattcgcccgcactggccgcctggcatcaccaagaaaaacgccgctcagcgaatcttcaacataccagagctggtctctgagactgtccactggcaggtccagggacttgacgacttcatgtacaaagtcgcggggcatcgggggaaagaagcagtgggtgtggctagcgaaattccggccatggaaaattggcctgggtgccaagtgggagccctatgtggagggccaggcgggttatctctatagatttgcgactcttaaccgagcgttgtatacaaagataatccaacgtcaacgaacctggaaaaacactatgggtgcgatggatacgccggccgtgtctcgctcactagacgtgatcttcgcgaaggtcccggccggattccgcccaacagtacgctaaccatgtcaagctggcctcgttggtcaccgtcaacaccggggatgtccgtgttgctgacgccgcgctgagggatgttcgtttcccgaagctgcgggtattgaaattgtgcgttcgagggagcagtcgcgattctgacattcggacccttatgggtcgccttaatatcccacgaatctagggcgaattagtcactgtcctctccctcagcagctatggcagaagggagccagaatggagatggcctctccacggattgcccgaagattgggcaaaattgttcagacggatctcggtatgcttctgccaccgctgttacgataaaccgctttgtactgattctttatcataggttctctttctaaatctcgagaaagtcgagatcggacacaacgtccttgtcgccgataaggttgtcaagaacttcgctcgtcggtacccagcccctaaggacccttgagcggcgctcactcgagcgttcaattatggcctttgacctcttcggcgaggcttcttgagtctgagatcgctgcgcttggggctttccgagggtgcgttgcaacgacccttgctccggcaaataattgtggaattaggggaggatggatagggacacaattatatggtataaggtccctaaccaggttgaggacagtctcgagcatgaagcaattgatggctttacctacaaagggagctgacgcgatatgaggacctcatattcgtttaattgctggcttccctggtcttggaaagcacgctcttctgcaaactgtggatgccgtctgagtaaatagactcgtccaacacaaactcgagccacaaattctgacgggagaaacgatgaatgtttcgattgagccagtcgcggggttcaggagaaacccccaacaccgtcccgagcagccacctgcattcttcgctgagtctcattttacaccatcggctactccgcaatcactctcatcgagtgatccagctttctcctattcaagctgtcatggagttgacagagtgctgattgatttcaaattataatcagccgagatcagacaagaacaaaagcggcttattgacaagcaatctgcgaatacggacctcatctaccccgtcgctaagtacccggatctatgaacatcttcgtggcgatttgatgacctttctttcccctgagctaccagtgtaccacatttgttcgaactgaactggcatgtaacaatcttcacgggaactaagtagtaagaggacctttcttcaagtcattgcaccgttgataaccggcagtgtcatccgtatagccctgcacacctaggctacattcaatatagcttagtctgaatggaccatactcccactttttctatccagaatatctaataaaattcaatttacaaataagagggacataaaccccatagagaggagatatccccacatgtagtatatatacttttccaacgccgagtagcacaggatataacctgctttagctctaaagtgaaacacctcaaacccaggcctagggataaaaaaccaacaccgctctttggtatgccaaactcctttgtatcatgacgccagaatgcgaaggacaaccgtcttaaatctcctgcgagtccaacgcccacacctcccaatgctgtagaacctcccatcctacccgtcgcgcgcgccgtttccacacaaagccatcatcagtaaaggtgtgcgggtagcagccgtagaccggaacaccctcgttgtcttcggctctgttgggtgtcctcgggcagggtggcggtctgtgagtttcgcagccatctagatcgcgtgatcgtttccctaatgttgatggcggtaggattggtcttgtgccgggtgacttcgaccaagaagagatatgtgttgtttgtgtatcgggcgacttatgggagacggcaggctgatacggtgcgctgggtccaatgccgtcggtaccttgcgtgggagcggaactgtctgtggtggtctctggggatgcattatcaccgtttggtgtttgagactctttattggttcctaatggtattggggctttgtagaagtccttcaactcccaggctttccagcccatgctgataatcttcacgtttccgtaaacttgcttgttggcaaggtcgtagctcaacatttcggtcaggatcgagtcgtcgatgtccaccacttctgcaaaagtcttggcattcgcgaaagtttcttgcaccattttaatgctatcaaatcgggcagatgggtatatcttcagtgcagaagttgcaggaccacctgacgcctgcccggtaggtgggggtatgagaagccggatcgctttcaacttccggaggaaaggtattagtagacccaatgagtccatactagaaaactcggtggcaagggcaagctgctccaaattcggacagctatggacgagtcgcgcgaccatcccggtggagagaggccatttagatggaagaaggagatggcgcaatgtcgcgccgtgatttgtggtaatatttgagaggtagatgtctcgcatactagctatagcattaagctggctagctggagaagcagaagtaataggggagttggctgtggttccgccgggcgcaccagacgaatgatgttcggatactggcggtgtgagcgccgatgagaccacccctcctccgggccgtgggcaattgaggatgtcgcttgattcggatgtgacattgacaaagtatagccgttcgagtccagagaaattcccaatgaactccgcgctccgctttgacactgcatccatccggatggatttcatgcggagcttggcatgaggcgggactgtcggccagctgttctcgacgaatgtgttgaccagacttgagccatcaaggccactgagaaatgtgacgtcttcgacagtagtcggatcaaaagcccagttgaactcttcggtgtggaaggcatatagattctggaacgtcatcttcttaaccgccagtggctgcttgcttgcgatcagcttgcggaagtaatcatgcagagagacactaggctcgtgtgcatcgcgcatccgtggcgaccaatgtagtttcaattcgcgcagtttcctactcttataaagaagagtcgagatatcatcggggtagcatagcgggtcgatatcggtgattttgagacatcgcaaatgcggcatgccgggaatgacgaaagtgggttgtgggtgacgactggacgggaaccggatagtcagagacgtgagcttcggcagctgtgtcaaccccagaaaaaccgtgtcgagcattttggtgttcaattcccaatggaagctttccaaattagtcatgcgatctatggcagcgcgtgcggcgatgttcagcaacatcgatgcgtcgggcacccggccgacttgggcatgctcctccagctcgtattccttccattcaccccgtagtgtcatcgatcgtaccagcgtcgcataagatcgtgtaataatggcattcaatcccatcgtgaagggactagcgctcccgattccttctggttgttcgtcgcgataacggattttgtcgtaggaggtcagcgtcaggctgcggtacagctgtggcagcgccatataattgaggactcgacatgttcgacatagccgggcgagatcgcctgtgtcgtcgacctaacaacagcatgtcagatatggaaatgagatgtgcggagttatctctcacatgtgacacaatctccgcaatgaggttcaacggcagagccatcaactgggcaccgccaggcggttcagttatgctcgctccgaacatgtttcgattgacggtcgccatgatgcgacgtccaaggtaaggtgtcacatagagatacaaagaatgcagggaaatgcaccggaatcgcgagttcccgagtgaaatttcgtctccactttcgtaagccagcccttggtcagccagcagccaagcagagatcagcgatagtcaccactaccaccactacaagcctgtagagagtatcaactatgagaggactaagtatggatgcaatattatattcaatttcaaaattataatgggtatctttctaagatgtcgaacggaatcctcccaacaccttgccgataatatcaaatccataaactccgtgaaatggccaaatataactgcctagaacaccaagaaatcgtcccgggcctagctcctcagcctccattcggcccctgaatccgtcggccacacgcgatgccgtaaaatggcgttttatggagaactttggccatgctggccgtttgaaggcccgtgcacaagggactcggatgtcccagtctgttccgctgacacatcgttcctttcttccgagtaactcgtatctgtccagctttgttggtcgtaatttgtgacaagttcacgatccaaatggctgatatcctcgttgatcagcgccgcagcttctgggtcgtagtgtaggacatagtctccacctcctcgctctacatctgcctccgtccatggagcagacgcttctggtcgagaaggaatcacccgcacaggcagattgggacgagtggagggcgctccgtgatgttgaggttctatcggccggctctctcccggtggctgggtgtcctccagcaggcggttttgcggggaccatgtgtgctggccgcggcgacgcgctggaataacagtgactggtaatgagccgtcggtgttttgtggtccagcgcctggtcgggctttgcgatggagagaaaagaagagatcggctcgagaccgggcagcttttgcttctgcctcggcctcttctgctgcagcagatggtctgtgttctgagaattcttcctcggcttgtgcatacgccacttctttgggcagagatgcacgtcgcctcttgaatgggtgcaggagaacatgccatcgtggatcggcttgcacgatctgcggggattgttctcgggtattttgaacggaaagagcttgattatggatacccggagtatgtggctccctgccttcgagttccttggcttcgtccatttcctcctcctcgtgcatatttggcattgcgaccggaggcgtagggctagccactggatgatatcggacattgtacactgtgcttgctgcactggtagtatcagcacggctgatcggtgtgatcgccgctgggggtggagtaggccggtgaccgtttgggccccgcggcgccgacgcagcggcttggctatatggtggtgctctggctcttttgtttcgattgccaagaggcaatccagcccgagcccgtagaggtcgatgggctaaacccatcacgccgccccatcctgacgatgcgccattgccgccaccttggtcgtgtccttgtggggagaatcgcggccagtcaacttcctcggatggagtgacttcaagcatttcatcgccatcaaaaacctctcgtccaagaatcccatccttggtttcatctcgttccagcgcttcaatacgttctacccattcccagaccaccacactggccgctgcagagccaacccatcgaatataggtaccccagccagcaacttcaggcttggcaatatccaaaacaaaaaagacaacaggtatcaaaatggcgcatagcgagagaagagccactaagcagatattccgcatcttggggtggaaaaatgcgtatcggtgcttggatatcgagtagaaaatcacccaagcggcatagagaaggttaagcgacaattcgaacaagtagctcagagcaggaatggcatcctcgtatagcctgggtcgtgtcggagcgttcctcgcccaaaaattgtccaaaatactaaaagtcgtatccagcacaatcaacgcaaacccagcccatttgatcataactttttccttatgtcgcgggaacaatcgaatcaacgtctgaacctgcgcaagccacagaaatgtactcgatatgacgcgcacgatgcgaatttccatgccgtcgataacctcctgggaaagcgcctcggcatcggaaaacccatagttatactgccgctcggcgactcggaaagaatccaccgtggcgatagtcagcgagatcgcaaccaagatcgcagccactttctgtagccacggtcgtccgccgactccaaccaccgacgagttcccgctatatgagccgctgatcatcccatggcggccgaggaagttggcgccgccgccggggccgccgacgtaaaacgtgcgtggcgtgatgagaaggattatgacgaggagatagctcacgacagtcgcacaaccgatggcatatagctgtggggtaatggaggaataaaatggatcgcgcgtatcgagaacggcggagatgtgaacctcatcggttggggagccagtgcagacaggctcgaagacggcattttcactgagggtaatagcgaatgacttattaagataaacgagtcctataaagaattcgcacctcgtaattagatatgattctagaaggggcgttccaaacaccaagtctgcgaccggcaaactgcagcctgcggcccaaggaccaaagtgtcgatgaagataggagattacataccattgataggcaagacgacaggcgtacagcccggcgtataaaccttcgtcgtagtcggtgttggattcgcccagatctggcggggaagcaagtggaagtcattttccatgatgtgactcgatgtgaacggcctcgaatcgccgtcacaggaaacagttcataaaccgcgcaatttccaccgatacgcccttgtcgtagacccttcactggttaaactcccattattgactctgatcgcgtacagacggtgcgaatccaaaatccggggggggggcgattctggaagggaactggagaaacagcaacggcggtgtgagagtcgggggacacgagacgagcaatgttttctttctgtcctactccgagaaaagaatgaaggtcgtaagatcataaaggagataaatctacaaggagacaaggaattaaggaattaaggtgaaagtctggatgctccgcccatttctcggctccgcattggctcctccacaaattcctcacgcttatcgccacaccgttgatgttgggtctactccgtacactcttctatatctcacggtttcaccaatatatgcatgcccattgtattgatatgtataagcttagctgagtcaagggccaaatttcactatgttgactgatcgaatccaacatatctatcatccatgtatcacatcgctcttcgctgtacaacattatcacacataagaatcgccgatattccatgggtaccatctcatcaagagatttattccatttatgcctgggcagcgaagccaagacgaggtccctcggagtcgaaaacgacgtactggctcttgaggaagatatcaccgaagatggagaagccaatgccagagttgctctggataccaccgtagcagctggagctaccggtagagacaggtgcgaagttgatgtacttgccgggaacaacggcatcgtagccattgatggtcacagtgaagtcaggcagagtggcgctgcaagggaagatataaccaccagcagagctgctgttctgggagccggtaaccttcttgtagtaggcggtgacaatagagctatcgagcaggaggagagtggtaccggtatctatacaattcaagagattagtcatggtaaacaaagcatggatgtccacaagggagaatgtaactcaccagcaattccggtaatagacttgccagcagcaccagtgccgatcttgtagctgtcggcagtgaaggaccagaaaccatcggagtcatcaacgtcggcgtaggccaaagttccggtgtacttatccgagtcgatgtagccgaagtcgtaggtgccaggggcgccgtgcttgagagtcacggcgaacagaggctcgccaaggctagacttgacggtgtcgaagaaggtcttctggggggtagggctgacggtgttgatggagctgaaagccagacccagcagaccatcgttgttcttgtcctgcaggaactgcgagctgatcttcttggcagcctcaacagcttggccagtggccttgactccaccaacagtgacggtgtccttgtagacatcaccgctagcactgctgccatcgccgtatgaaatggaccagctagcaccggacagcttagtgccggagctgccaacgttgtagacgtcgtggccggactgctgcgaagaggtaagctcgctagagaagacccagctatatgaattgtcagttgttgcccttgctagtcatgccatatcaaccaacttacaggtcagcagagccagtgtcgaagtccaagttcaaggtagagctgccaatggtgactggagtgagatactcaacgtcgtcggcctcgggcgtggtaatggcggaaccgctcacggcagcagcgtgaactgtggccggcacagtagcaccatacttgaccagtgcattggcgtacagaccaggcaagttgacagtcctggtaccgggaacagccttctgcacctggttcacagtgaagcccttgcgggggctcttgaccggcacagccgcagctgaagcaatggccgagaagcaggtgagagcgacggtaacttggctgaagacaaccatcgtgatagttctatagaagaatgaatagatctattgtgaacgaagacgatgctggagaggatggatttcataaagagatggaggcaagacctcctttatagctttcctgatggatgaaatccgccggcgtccgagtagaaggcatcaacggggctgtctatcgcaacatccaggacaaggtgataatacccttgtaggaaggaaacatgacgatcctgcagaatccagtcaagtcgaagagaaacttcgagatcgtcacggataccatcggccatccaggagcacgacggagtccgccaagtaggcgattgaggggtcaagccaaaaagggacatagtgccagggtctcaagaagctaagatggtatcaaatggacgtaagaggattagcgcggccagcgcacaggggcgggagatgtatgagatgcaacacaagcaaaatgcccagggagcttggttgtaacaagctatctaagcagaacggagaagtccggccaggccaaggcgttgtcttgagagactgcgtctggatacatcattgggtgaagactggtcgatcgccatacttggccatccttgtgtaagaggacaataggttgccattggctcaagccgatagccagactacttggattgtctttcggctatgttgtagtcacgctgcatcgagggattgttcagagacgctggagactagagccctgacgatcatcgcccgttatctccacgacagccaatcacctgcgcgaaaggccaaaactaggtcacatcgctccattagggtaatttggcctcattggatgagagacattctgcgtatgagccttttgggtttaacctagtgcctagtaaggccatactagctctcaatgaaacaagaacagttataatctccgacggggatccgtccctgcattgtatgctccaccaatccttatacagaacatcaacatggggtccacgatgccagaccgatgtgacccttcacggagagagaccaaatagcggctcttatctgcatcgaaggcatcgaaggatctagcggccgtcgagatggcgatctgctcatgggatcggcgagtaagatagtagaccctacgtactcggcagggataattgagtgccgtgcatgccatcaatcgcattgtttgtagtctatgaggtgactcttatggtaatgtattactctcgacctgactgtaatgaaatacggcaatagttactatatttacattgttctcaagcttaacccatctcgtatcaccattataaggccaaagccacccgaaagcttcaacctccgcggcccaagaaacttttaaaatatcatgtgaaagtcaggagaataaaagtacttgatttctgcatgaaactagagaccccgcaatcgaataaccccccgacggacaccgccggggaggtatagggattcgcaataatcaatgatgggctgcagtaatagcaccatcggcagaagaatcggttgatgcaaattacggcaaatggtgtagacaagaaataagaaacgccgggtggaaaactcaggggtatataatttcaagcaaaataatagaaaaaggtacagaccatgagctagatcccgaaaaagactcccatattaaagtgtaagactaaaaagaataccaaattgttcgtcatcatcattattttcatcacaggtactgggacgataacccggccccagtctcaccctcgccgttggtgtttccatcatacccctcattgaggagtacctcgagcatgtcaaactcgccaagcatgggtcccgtcccaccaaggccctggtcaacaattccggtggagctgttgaagaattgatcaagaggcaaggcaaaccaatccggaagcgcgccggaggtagagtggtggctgtcccccataggctgtgatgaggggacatggtttggcgatgatcggtccatatcattggcagggaatgtcgagctggattcgtagtagttgtggtacacggacggcggaggcggcatgaaggatacgttgaggttggatgagttgatcggctgggcaggaatgttcgccagtgggtcatttcctgacaccatcggggggccggtgccaggagtatccacatatcctaggcccgacccgcctgacgtcgtatcatgaccctggttagcggaccagggtgtattcgggccctcacgacgagtcgttgagtgatcgcgcgatggtgaatgaggccgagagcctgagactgaggtacgatcatgtccgtctccgtctgcgccgcggtcatgcggtgcaaagcgcagaaagcgcgtccgaatgctgctagtgagaagctcgagaagccgggctaccgtgttgctgaggtgcacgtcatccacaacataattgcgcagtgcctctaccgtccggtcctgcaggtctagagagactcgcacgtcgtcttctctggcacctagagtgaaagtctatggtcaagattagtattatgcttgccggggtttccactagagaccataccttcaagatgaagatcattccagacaagattcggaaaaacgttcgaatgggtgcgtgtctgagacgaccttcagggacaaggccttccaatactgtttgcaggattttgcgcgacgaatcaatgacttcctggatataatgctcattaacacggtagagctcgttcaacgtttggaaccagctgctgctgctgttagacggccccgatcctggttggccattctgggtctggttatgagtctgggtggattcgttggacatggtagtccatcgatcaacgaccgcttgtagagcgagggaatttatatagagacctgcttccatgtcagctgttatccttcaacgaatcaggctgtcaacttacgggtgtactcgagctcaatcagcaaaacgctccgcattgctggtgagacttctttctgttagctttcttatccatattcaacggccaattgacttacgagtcacactgtccagctgctgctggaaatctcgtagataaggttggaagcggtcgatctgctcacgatatctcccactcctgatcagatccatcgtctggtcactagatgcaaacagcaaatgattggcttgatagacaattttcgaaatgctaatccagcaatcctgcatccgatcaagattggcatcagcatcatttgcatcagcggatgtcggcgtgatatcctgcccccattgaggcaatgggagcatagaggggatcccaagacgtccactactatgcgtaataaacacaagaatcaaacgccgtagtcgacgtttccgtgtttgctcggatagcgactcattagccgccttggcatctcccttcgggtcgaagacaccaagttcaaaagctagagcttgcgccgtactcagtagcatccatgacatccgatccgatcgccaggccggttccagccatttttgaaacgcgacccttccctctgagcctttgctattattctcgccgtcgttgtcctggtggtcggcctgactgtatatctggggatctgtatccaaaagagaattttcatcgtcgcccggtggaaagtgtaggtttcgtgggtgccactctgtaagaagaagcatagcttctatagtgcccagcgacctcaattgcccacccatactacctttgcttgacgttgatgaactcgaatcaagtgatcgagatcggccaatgcccgaggtcccagcgtcaaatttctcttggccccagaataggcgttctaccatgctgcgtagatatgcccagagacgatcatggatatagaatgcccgcgtattggcaccctcacccttgggtttcagatgcctagatgcgatagtgagaattgtaaccgccagcactggctcatcggtaagcaacgtgcggtgtgtagaaggatgagaaaaatcagggattacaacagggctcatcggcgcgaggtgttcatagtaatacgccacatagtccatgccttcctccactgtaagccaaccggcacggacgaatcgcaatcgtgaccaggctcggattgcgtccagatatgtcggctctgggggagggttgttgactgggctttccctttgggggccgggatccgcgatctggggatctaccggccctgaagcaccacccgggtagtatgttgacccgcccatagacattcctgatcgaggtgtccgcacaaaggacccacccaaacttcgaggtgaactaccttgtggtagaggtgaaggccccgagttaaaggacgagacagactgtcgtgcagcaagccgattttcgaggctctggcggttgagatcctctgtcctgcctgcagcttcagagagaagatgcagagcgtcgtgggtgtttgtaattgccggtgacagcaactctactgctgtgcgattcatcatcggaggccctccatagctaggtggtgcaggccgttcgatgccaggatatataggaggtcgtgttgttggcacactgggcatgtaacgcggagttggaggtgctggaggcgcatgtggcgcatgaagtgcatgaggtgcagaaggtgcctcggaccatctctgttgggcaagcacggcttcacggtcgaactgaggtgtatcggaaggcgcaaatggcggaccttgactttcattcttggccacctccccaatcatcattcgcttgtcgcgatggaggattgccgctgcctccaattcatcttcctcggcatcggaggtcttgcgctttcgacgcgttgccgaaaattcacatcgtttactttcgcgacgacatcgaacacagggtggggggcgaggattatcgacacctattttttttgtggtcagtccgaccgcagaatgaaaaggaatgggagtccatacttcctagatcacacttgaccttgcgtttgcgacatggatcacaagcctgatatcctcggcgatggtgtgcatcagactccgccttgctgtacacactattattgtcccccatttcgtggatcgcaatcatggggaaggctccgacacaaagcgatggaaagcgagaataagccttaaaaaggcggtgggggtgttcttactccgacgactcggactaaaacagtgggcacagagtcttggaaagacaatagaagatgaaattgcacttgaaattgccaaaggagatctcttggtcgaaatatcaattgaagtcagagtttgctcgcagtcactggacctggtagtttccattgtataatgagaactctgcggggtaagacacggaattccagaataccacctacatatgtacagatatatatatgcacatgtacatctcattactttgaaaagtagatcctattctaattcagaaatgcgacaattcaaccccgacgttcaagatgtaaatgcacaatgcttctaaaccgagaagaaaaaggagcaggggaatgccacaggctaaagttggtggcaattccacttgaacggtatattcaaccctccacaattcattctctgttctctgtactagaaaaaaaaacctgtctatttcacccgctgtgaggcgaggctaacgttcatccgggacattgactcccaagctttgcgtggcggcaccagctcaccagatgcaccactgtccacgctgccacgacgtgagagatcaggcggggaccgcccagcaacgagagctctaacaccaccagcttttcgggcggggatcaccgagtcgccagaagtaagaacgtaaagaaggtacttgagattcggaagagtgtgtcggatatccaagacgcgcagtccttgtttgatgaggatgtattcaatgtctttgttgagcaagaagaccgcgtactcgaatcgatactggacactcaccggatagagggggtaggtgcgctgtgggagtgatgcagagatggggtcttgtatgaatgatgttgacccgttcgcgttgatcgagtatgggagatgcaccgacagatagaatgagagcagatagaccaagtgagctgtgtgtcccaatgccgctgcgactacctcacggtcgatatcctcgaaagtcgagtttgggagggccagcccggcgatggtaaatgccaagggttcatcggggatgggctcaatggggtagatcgtgagaagatcttcagcaatacgtcggacctggcccttggtatcctccccattttgctcgagcaattgctcgctggaaactaacctctcctgagcctcgggaagatgaccgcgtgtcttttcctgagtactacggccttgttccatcgcttcttttcgggctttgatactggcaatgagctcttctttgcgcctgactgcggtgcggactcgtttgcgctccatggcgacataatgcttggtaagagcaagcttttcctgtgccgcagctgcatcactcgctacattcaatgagcgctcattctgctgtaggattgagctaatctgagcctccaatttttccctggttgccagtgcatcctgtacacattcgtccaaattggccaatctcatcaaagcgtcataggacgaggatggtaagacagtaccctctgcagtggccctctgtcctgcagcttggagcgatgtttcgaccggcggaaggtcagtgagattggaatagacaccgtctgggaagtgaaaaaggatcgagttcgcaggaagtggttggtggaagctctccaatgttttccccaaaaactgcagcgatcgcaaatgcaactgtagttcaactaatagaataaacccagacatgtccccggtctttgcccagagtctcagagtcaattcgtccattcgagagatatatgggccacacagattcaagtcgaaaaatcggaaactcggattgtttgcacggtcgaccgtctcgctaatatagaccggcttgttaagaccatcacaatgaagtgagaagaatgtgtccgccatacggctattggtgatatcttcgagtctgacctgccgaatttgaggattggggtcgttccagaacagggtacttctgcgacgcatagaaggcatcgcaggctcctttgcattgtcatgttgactggaatgcgacttgagatcagtgaaggatcgagagggttgcaaagtgcggtttgtgctctgcgataggatcttcgacggcgtctttaaggtatttgggatatcgtcgtcatcaatggttttgccgtgagctcgagccgggggaggcgtcacaactaagttgcgtatagagattccctggagatgccgaagcctacggttctaatagtttgtcaggatctagcaccgacgtgttctcttccattctccatacatacccatgcatagagccatggcctctctctgcgggcacctatatcctgctccgtgtcctcatccataacgccagcgctgcgggagagcgcggtggtttaagtagtgcgttgctaataaatcaagtcactcatattaaagacaacagtaacaggcaaattgcagtttgaagcaattgaattggcgaaagagagaatagtgagctgataagagatgatgcggagagcaagcgccaagacctcagcgttccccgtcaaaaaatcgacctcccgtctctctcgatcaacaccgtctggcgcctcccaccaatgcaataaagccgcacttctcactgccccgattcttcccagatcgactgtacgcagcctccggttcggccgcaatggcctccaacgcaaagtctttccaaaaggtgctggatgcaacagcacttgcggccacgaaattcatccgccggccaccgattgatccgaaattaccaattcaaggaaagccccgagtaccgggctcaaatgcattcaaagatcaccaggaaaaggagggtcgacggttacagaaggccttgaattccgtcagccacggcaagaacatcttcgtgtacaacaacatccgcacgaaacaggttgtatactcattgactcgctacctggaggtgagtttcttttcccctactggcacgggctttgaaagctccggtctctcgcgaaaccctctatgctgtcctatccttccagtccgccgtatcgcaattttctaacttttgggacctttagaaaaacaacctcctcaagcaatgtgtcaaccacggcaaaaagaccattcccgccacagtccgcaaggatatgtgggtgccatacttctctgtgcacttcaacgaggcacaagtcggactgaacgtctataaccacctgcggcaattcgcgttgctgcgccagctctccccgcccaaggaaatgatcaccgtgacacaagaatatctcgattcgaagcggccggtagacctaagggaccagaagcaatgggacaaggaaaacatgggaagagtgggccagatcatgatgaagaaggagcgtgcttacgccctgatgaaccagaaggccaccgcgattgccgacattgctttcgttctgcagaagcaccgagaccatatcgtggagggtgtgccggagagctccaagtccggatacaagactctcaaggcccgtaggcgcagacgtgcggctctcctgcaggaggccgcgcaggctaaggaacgtgcgggtgaggttgcatcgctcgaggagcagctgcaggttcagattagcgcggaccacaacgcgccacaggagaagtctgttaagatcttgtggcaggatacgtacgatgcgcagtttgcgaagaactggcccgattacattgagcacggtcagctgcgctggactcgtaaccacatgattggccaggaggaccttccagtccctagcgaggacatcatcgccgatggttcgtttgagcaggcgtagacgtttggtgtcattgacgttcttcttctctcctgtccgtcgcagaccaagacgagacgttttgtgtgtgttgatatccatttccctctggctttggtctgatggttggtgctttttgtattttctctcttgtctctctgtctagcttatcctagcatccataaattgtacttttagatatatcaaatcacaagaagatatggccaccttccaagtgctgtcttcttttgacatcttttctagcgtcctgttaagtgcgatctctttcgtttttttctttgtatcatcttcgttctctagatgaacggtggaaaagatattataatgcacaaggcctcaagtttaaacgactaactagggcgttctaaatcaaaatccttttcgttcatagcaaatcaaccgactgtctatcctaatgtccatcgcatcattgctgatcataccctacaccagcagcggatacaacagacaggtaccatgtcttcggtttaaagaatcatttgatggaaaacaaaagagcctaatctcatagcggccaaattcaggacaaatatcctaataatagaaggaatagaaagacttatgctaacaaaagacatcaagaccaccaagtctgatctcgtaataaacaaaaggttgaaaaatgaagacaacgggcaaccagtgtgcaccattgacgccaatgtgcaatgtaataagtaagcgacaggaagggaaactccagaagatattccgggttgggtacattgctcccagaagcaccagatgtagatagcagacgaaaagaaagaaatggacacgttctatcaattcgtttcacagcttcagaatggtgtttcggcttcataacatgtcgtaaaatcactgagtcgagccggacgggttgtccgggcttctattcggactcagaatgtccacagagggaaggtcgttattctctttagatgacgtctcgggcccggggtcttgtttgtcattgctgttggccattctctgaagaacctcttcattggccttctctgccgctgcgggattatctgcaagaccggaagccacgaggcttttctgtgctttctcgacaatcttatcggcctcactcacgcccccagccacctttgtatgcgggtccccgtccacgcctatcaattccgcattgttgttgacaatgtccttgacacggttggagtcgaggcgaatcaccatgcaagacaggttgtcggtgctgaaccgtgcaagggcgtggtcaacaagaatctttgaggcatgttgagcatcttgaacgttccggattagatcgacagattcctgatcactgcagacgtcccatagctattgaattataattagctttcttgtatcatcaactttgtgaatagatttcaacttacaccatcgcaggccaagatgataaactcatcggaatctggctggataaccgtctctgtcgtgtagggatgcccagtcacaaggtctttcaaatatgcatcgcccaaggcacgggtgacggccagaactccattcacacggttgttcaggattagcccgccagcgttggcaactcttctcccttcattctcatcgctacccttatggtcataggacaaacgaagtgctttcccattacgacataatacaatgcgtgcatcgccaacgttggctgtgtacaatacccgttgccgaatagccttgtcctgcaacttcgggagcacaccagagacgcccggagtagcttgagtcggggtttcgacattctctgaattcgcatccgctttcgtcgccgcggcagccgccgtgccaatggcagaagaaccggtggccgactgtgagttgggtacacgatcttcccaccgaagcacggcagtgacggctgtgcacccagagtttttgacaggcaatttctccaactgctggtccacactggtgaaagtctgatcaagaagctctggaacgggagtgcctgggcttttgcgcatgacatcctcaagaatcaaatgcaacttctttccacaccactctgcggcaaaggtgccggcatgcccatcgaaaatcgcaaaatagccattgtctgtttctacaacggtagatgaatcctctgatgactgtgacacgctagtcttgggggaactagcaccatttagctctggtgcagttggggcaggggtgcctaggaaattgtagagataggcatgcgtatcttccattgtccggcgacatttgcgattacggtcttcggtaacaccaacgcggaaggatgaccgagcagtcggcgcagattcaccggcggagttattgaacgacccttgagggacgctgagggccgggtccatctttccaagcttctgtagtgggctttccgcaatcgagggactggtgctgatcgcagaactatcccggccgttcaagttcagggaacttttggcgctattgaagaaatttgccgctttggtaacggtactactcctgcgcttcttctcgccagtggtaccctgttcttcactttgtcgacggttgaaaaacccagcgctgggcggagagaatctcttatctcgtggactggtaccgattgaatcggtttggagggtcaaggagttggggtcgaggccagcctctgggagtgcgtctactttatctttaggtgggctcgaggagccactgaacattctgctcagtaacccaccctgcgaagaaaaactgcggcgcttatttcctgccagcttgattgtatcccttcaagaggaattggtggatcgggatggtggtttagtgatgggcggggcgagcacggagggggcgctgcgaggctgacgtaggagtcggtcggtcgaggccgaaataggaagaattgggctgtaagtgctaaataaatcagcaacgagtatttttgggagcgaagagatgtctgaaatgaaagacaatgaggcgcaaatataaagaggaagatggtttaggcagtgagcggcacagacatgcaatgggggggggggggcgcatagtaggatcacgaggggaggtgttgtctcttccaacacataaaatatgaaacacaagtaagagaaacaagaccaatcagagcaattcagagtatatgaaacccatcaatcctccgagcaaggtacaatgtacatatttgcaccattggtcaatgtatagcgcgtctaatgatccgaccacatccccaacccaggcagatatgaaactcggtatcaaatgaaatcgagaaaaggaagcaacttacaagtcaggattgagagaatgggattgtgagtagaggatgaaaggtgaaaggtggaagaaggtgaaagaggaaaaccacctaaatgacctccgctgacggctcacacggcactgggcggagagagccaagactgccggggtggaaatggatcttagatctgatatatggggtatctcgtggatctgatatatttcatatacttgatttcagaggcatattggagtgtatacgaggtccgttgcgaattcatcgtacgcatgtttatgacacctctccgcctttggtcgatgacgctatgatcttgtttcttgttatcttgccactgtcatactcatgcacgacataggtagatctagatttaaacagctaacctcgcaaactccaatgtacctgcatcgtccgcttcattgtggataggttgctcactttcatcagcctcggtcccttgttgaaggtcgctttcgtccttcgccttcttgatatccatatgacctagtgtatattcatctggatcccacgccaaaactctgctattcatctcctccaatttctgcacagcaagccgtcccatatcaagtttctcctcggagttcaagtgctcaagtctttccttccatgcatcggcgggatcagaacactagttggtccgaaaaatcgactgtcgatcttttgccagtatgtagcatcgaatgcaaaattgttcctcgcgatgtacgcaatccagaaatccccactttcccaactctcttgcatcggaccagacagtctctggtcttcttttagttgagacttcttgatcgctttatcctcgcgattgatcagggcccttaggaatgtctgaagtcgacactcatactccctacaccagtcttcaagaccgccatctgtgggccagtattcgggcttttcaataagaagccaccaaggtggcacgtaggtgaattcaacgggggcagcatatgtgaacttccagtccacaactgcagcaattttcgattccttgttgagaaggacattacctggtcggaaatcgtcgcaccaaagtttaaaggggctatgctcaaaagatgcccatcgtcttgtgagtttttgttctcgcgcgagttttcggaagagacatctggcaacgaacttgtgtcgacagtcatcggccgagtcaacggcgtcgttcctttggttcataagatgtgtcatatgcagctctgctaagctcttgaagtataacgatgttgaatcgaatgtagtgtccaggcccggtaagcacgcttgaggcagtgatcctaatcgaataagttcattcataggcatcgaaagaggtcgagatgccacttcccaggtgagatcatcaatctggccaagtgaccctatatgagtaagggacggccgagagagctgaagcagaatatttgccagctctccctagagccgctcaagttcatcctcatcaaaatccgggtcaagaattctacggtatgcccgtgagcgacctggcgtattgagaacatcgtacatgttcgtatggtgatccatgtattccatgattataaaggggcccaactctggatccaaagggccgtccttccgcgtgccccaatgaaggacaaaaggaaccgggatggaagtctggtcaagaatgtatcgcattatagcgacctcattgcggactttctcttcgggaaacataatggcaccagctgtggaagacgtattatagcggaactagtattcttgtatgtcatctcaaaagagatattgaaagctcctttttccaaaaaatcaaatgagtcaggcttgtcgggttcgtgatgtctcacaaggaaacgtccaagctttctcaagatgtcgaggtcggtgaactgggcgatccaagcttcagacatctcttcgcttttctcccaggcagcatcatcgtagtacatgcgtggtttcataattatggatagcttgtatagatgaacttggaggagataggggaagatcaaaggtgcatagcgtgacgccgcgtgagcactaaactggaaagggaaagctagaagatccacttgatacatcataaatatgaagttctcaggttaggtacttatgtacacctacgtggcatacgtaggcaattagccttgataactatagaatctgcttagtgtaaccaattgcaggatgtgatcaagcatattcacataaaactacaactcgaagaagaaaagaaagcattaggaattagatctattaccatgaactaaagtttccaaagcctccagacaccttggcctttttgcgagcgggctcaggtgcaatctcctcgtccagaaactctacaatctcatcttcttcctgtccatcccggtcttccagtgctgccttcagatactttccaactcccgagacaccgccatcatttgagtccgcctcagaaccgcggacccgctttccagtccaggtgactcgatcatcgtccgcacggcgagaaatctcctcttcctcttctgcagaaggacccgtggcacctgtggcccgcgcctcttcggcgcgcttctgggccaggaagtcctcgaacggatctacaaagaccgttatttccttgatacgaatatcgggggtagggcgattcgtagttgtttccactgggtggatctctagcttattcaaagtagtggacgaaggcgttgggtcgtcgattagacggccgaagatggtgtgcttgaggttgagatgaggtagggctcgataggcgatgaagctgaaagcacatgttagcgcactcattgagccaggggtaatcgcaaggggccacttacaattgactactatttgtgtttttgcctttgttggccatgctcagcgtgcctcgggaatcgtgcttcaaaggcccttcaaattcatcggcaaagtatttgccccaaatactctcgccacctcgtccagtaccagttggatcaccaccctggagcatgaagcccttgatattacggtgaaatggtatatcgttgtaatagcccttcttggccaactgaaggaagttccacacggctttgggcgcatgctcgggatacaactccagattgagatgcccggcggtggtcacaatgcgcgcgtaagccttggccttcacgcggccacgcttgagcatgtattcctcctccgatagtaccgctagctcggcagacgtgtgtggcgtcagcccggtgctagtaaacgacgcagccgccttgcccgtagtgaatcgtgcagcgttgtagggtgttggctttcccgtttgccccttagaagctacattcgcagctacagtcttcgaacccactttcgagccaatcgcagcagaaccagcctgctgagcacgttctgaccgtgcctttgcaactgcctctttcgctttcagaatcttcgccgagctgccgagtgcactggtgttgacgctcccagaggtcggttggccttccaagattcctgtctccccctccttgatgtagttgaacgagctgaggttgcgcgactcgatgttctgcgggtcctgcaaggtgataatatcttttcggctgaattcctcatccgtgaccaagtcgcgccacaattttcccttgatgttgagtcgctccaccgtatcccaggaaaagacattccctgtattccgtaatgcgacgatatgtgtattatcggtcagaatcttgtaggtcaccggatcgacgtagtcaccatcctcgttcttcgcgagagtcaacttaatcaagtccgagctcttcaatggggccccatcgacaggattggtcccatgcttcttgatccatggcagaatgtttgtgaggtcgaatagtgttcctgtaggcgtgcaaaccgggtgtgaaaatggttggagggaaagggaacagaaattgaacggcaagcgcttgaacgcggcgtgggggccgcccttcttggccttggaaactccagcgccagcactggccgagaaagcatctgcagatgcccactcggagtgtgtgatctagagagagtacaattatcagcggggattcaagatgcgagtattggaatgtagaggaaaatgtcgcgtacataaagcttatcggttcctatagtcaacagcgttagtgaaattgtacaaaaaagccctcacacacgacataccttttcccataattgaagatcaagctgttcagcaactttcgcgcagcgcagcccgcggagatcgaatgacggcaggacgcttaccgctttgagattacggggcgaataatattgccgcgcagaaaatatatcaataagtaagcggagtaaaaggcggtaggctccattaccctcttcgagcaagatatagatatccaacttctacaagggaaatatgggcttaaaattccatttgtattatctggcttcgacatttcgggccatttgtccagaacctgaggtcagaacaaggccagtggataatcatacatgtacaagtgctaaccccccgctagaaatcctagaaacccatgcatcatgaaaacaaacgctgtgtgaacagagctaccagctccgcctgaatcgtcacgcaaattgaaaacgcctccgatgacaatgtagatcgtggtaattcataggattagaaagggccgttgtgtttaggaaattgcgggttggtacttcaatggcacgacccatttgtttccgaaatcaattccatggcgacgacgggtaccgtactttctccagacgatctgagggattccgatgtcggcaactgccagattccaggatagtctttcaccagacagaacagcattcagcactccagtcttgggcgctccgaggcacaccacagatgtggcattgacgcaaagtcggccaccttcgaccagagtaacctcgcctgtagatttttctatattagccacaccagttcagactatttttcgtaagtacttaccagtagaagcattgagtccggaggggacatccacagacaacacatcgacgttgctgcggttcatccacgcaatcatctcaaaggccacaccctggtcgtcagttcgaaggtcgtcaaaggacagatgcatgccaaacaacgcgtcaataatcaagtcgggccctaggtccgaggtggccaaacgggcggatagttcttcccatttgagtacacgtcccccaaccttgcggaagatatcgagctgtttgcgacagttctccagcaattcagcttcgtgttcgagcccgagcaaacagactgtaacccggtgacctcggttacgcagatggcgagcagcagcaatcgcccttgccccagtgcgatggttgccagtaaggataagcatagtgggtgcagcagcatcattggacagaagagccacggcagcctcagctattccccgacctgcattctctgtaatgatctcatcggccaatccaaactcggcgaccgagatttgctcgatctccagagtctgcaacgggctcaccgtaggacagctgcgattggtggttgcgagccggaaagctccagcactagaaacattaggcgcaatcattggcgacaccgacgatcggcttggacgagggctagttgtacgagaaatgttgacgtgaagctggctgcggccaagcgcactgagctgtggcaccattggcggggcctgcatcgcgctgtctttgcggggaggctgagcgtgcgcaggcgcccttggccgctcgcgtcccgaaagtgtctcgctgctcagtttgatttcactaattccttccacatcatccccggtgtcgctgtactgtgggctatcgagtacattctccgtccagtgtaggttctttccgccgttggtgcccggcttgactcttcggttgaagctcaccagtcgctcctcgtctgcggtagtgtcatcgtttcgaatttgttcaaatacagtccgcttatcgaattttgacaggttgcttgcgaagtcgaattcgcccagctcttggatgtcagtagcatcttcggttgcccagccacttggatcctcggcataacggcgtgacttcttcttgcgaagtttatttccagaccggctcatagcttcaggtgaatcctggaatgcagggacagctggctccacaaatgcagtctggcgccagcctttgctctttgggttggtgcttgctgcgccgccgtgtttagcgacatatcctctctcttcccgtacattttcttggttgccacgtcgactccgctttggtgtctgttttgatggtgacagttcctgtgggctttggagtaatttcttgtgggaagtcccttgtattccggtcttgtcactatctgcattcaattccaggctgttaaatggctcaaccaaagaggctgagaccaccccagagtgttggctggcggggacagtcattggcgcattctcaacaaacggattagatacgagaggggcttttgaaaaactcagaatagccgggtcggtaaatcgttgctgtgttggagtagattgagtgggcgctgggggcaaggccattgctgcataaggttgaagctgggggttaggttgatgctgaggttgaagctgaggtaggtgctgatgctgcgagggaacctgggtattggtttcgagagagagggtggtgatagcagaggcatcaatggaatattgaggcaggcgttgaccgttccagagaaatgtgactaattaccaaagggttagttattatgacattacatactgtactcattcatggcttaccatcctggagcaacaagcgctgcccaaatacgttggcgacctggcccaccagtcttccaccgtgtggctctttcaatgtcaccagcacattgtagccaataaattcagatgccatgatgattgtgagctttcgtagtccagctgaacaatcatcaagcgtgcaattgtatttgttggaaaagcgcgtcaaacttgagatgaccctacggagttagacgagagagctgtgagacaagctgggcagctcaatcctagggcacgtgatttatactatcgataagcgatagtcgatagtcgatagtcgataagccgtggagtggcgagggggaatacgagaatacgagatactatagatatagatgcccatgggtggtttgaagcaatttgtgtattgttgatgatcaaaatgcattactgatacataagtagtgagaccttttggatatcgatgttatttctgacctgggaaaagaaaaaaaatcgcaatcttatatatgaatcaaaagtcttcgtcctcaaagtcatctgggttcaaagcaattgaggacttcggcttgttgatctctgtgcccctggtgagtttggagtagaattcctgcactttcggatgcaccatcaccttccgaggctcaaatcgagtaacctgcagtccctcctgtgacaccgctcgacttagtgcaacataagcctggcccttttcaaacactcgacccagatcaacttttacacgttgaagagtctggccttgggccttgtgtatggacagggcccacgccaatatcaacggaacttgttgacgttgggcttgtacttctccgttgggaagctcaaccttccacgtctctggttgacacagtaactggcgttctgacccatctggctgaaggaaagatacaagcggccatttccgggccattgaagctgcgccttcttggtttcccataggcttcagcttttttctagcttggtgagcccgctcctcatcgcttccagtcgtcgcgtcaccggtaaagtttttgtcgttttccctgaaaacctcaaagtaatcttcactcatgaaagctaccactttcccaatagagccattgacaagcgaatcctccatattcttaatgagcatcacttgggcacccttcttcagctggatcataggaggggctatgcagcctgccagcagtctcgcgcgttgctgagggtcctgaattgctccggaatccactgcgttgaacctcataatctcgccagaaagtcttcccatgcgtgcagagttggcaccatccacttcagcgcgggttgggaacctaattcaagagtcagatttgacacagtataagtatatagtaaaacttacagttccgttgcctcgaactggtctttggcatcaaggggccgagagagccgtttaaaagcctcaatcgtgcgaggggtgattttacccagtcgcatttcattcagcatattagcaaactccggatctcgttgacggaagatgttggttaagagaacggtatgttggatacaagtggtccaggaagcagctgcaaacgcaaattttgcctcccggttgcctccgtctgggactggaggtaattgaaagaagtcgcctgttacaacaagctggattcctccaaatggacgaccattgttgcgcattcgtcgggcaatctcttcgagtttatcaaatagatccccgtccaccatggagacttcatcaacgacaaggactttggtacgcagccaacgatttcgagctttcgggtttttcttgatctgaatgttgttagcatctgcaattcctgggtgaatagagagagactccaacccttttcactaggtcgggcactggctctttgcctagacctatcccagcaaaactgtggagagtcacacccccgatattgcaggccgcaagacctgttgatgctgtgactgcaattcgatcggattctttgcgatatttatatcgcagctgcgcaataatttccctcatgagtaccgattttcctgttcctgcagaaccagtgaagaacatgctctttccgcgctcgacaacagtcttaagaacagcttgttgctcttcactcaagaaaacattgtgcaccttcgaacagttctctggtttcgggtttatgtcgcttttttgcgtcttcttgtattcttgtcgcaactctctctgttccgctttgatggtgctctcggacttgttccatggttctgcaggcctcgaccgtttgggggtcacaaagctctttttcttgtcttcgcggggttcctcttcttctttcatccaaggaagagtacgaggtttcttcgcgggcggttggaaatgagagggcggcgatgacgaccaaggtaactgcatgctgctgggaggagcttctgcttcttgggatatggatggaagatcggggtaattgacatctgttagattttcgttgccgcaaacagaccggtcgattcccaatgtagtgtcaaggcttggatatgtgactttgttggagatggcggtgccagccacactcggcataatcagcggatagggctcatcgaggtccagatcatcatcgaagtcattttcatcgaaataaaccgcgttatgaagggaccccagcgaggactcggccacttcgatttttcgtttgacaccaccggattgtgattgtaattgtggcttcgaatgggccattgaattagcatgcaataagtcggcttgctgaagaggtttcgtgccactgcctgagtggtcttggagggctttcttgaacattttctcgggggctgccgcgggtcgagatgaggatgaatacgcaaatgaactcggcagtctctttgggcaagtcaaagagagcaatcgaattatgtgtatgccccgcgccctggatatggcaacatgcataaaatagaatgcagaatgcaaaccaagacgatgaggtcgcgtcagacaattccgatcgggacgcagatcgattttcggtaatcaacgcgttgcagacgcgattatctgcacgtgacgggccactgataaggataacaacaacaccgcaaggctgaatatggatttatctcactagctttgtactattcattgcctatttaagacgttaccgagattccttgggattgaatatactgtatgttatacgacggtccaaataattaagcttttgttggcaactaatgaccatattatgacaacttgtctgtaatatatacttcgggtcaattattcaatattcacaacacattgacccaaaacaactatgaactacgagttactatgatttcccatgcaattagacagagtgagctagatcatcattgtagttaagtgcaatttgtgtacctgcattcaagtatactccagaatgcgaggggaaagcataccacgtgatcgtcaattaccgcaaaatacgcgggacgagaatgcagaatctagatctttccaaccaccagtcgcaagagtatcttgccagtcacacgatattgaagcagcctgcactctgcgaccatgaggaatggcagggatggctgtttcgagtacgtggaacggcttttttctttcaaattcgagcacatttgctaacaagtcatgttatagataaagactaccctctgacgggtgtagtcatatgcttcacatccgtacaagttgagaagagagtatgtgtcagaaagactcgtgaaactgcaagcacaggctgacctacgttcctattgtacagactccattgactaaaatggcggaagaaatgggcgcgttgcacagtgttcaccttacttcggacgtaacccatttgcttgtaggtgacacgaacagcgacaagtataaatttgtcgcaagggaacggaatgatgtgctggcaatgaacccggaatggatcgaggctgtacgacactcctggacacagggagaggatatggacatacaggcgttggagaaacaattccggctggcaacattgcatggcctcaaaatctgtatcactgggttttcggaccgtgagttggctggtttccacaattgagcatagatcaacgctaacgaatgcgctgcagttcctttccgagtttacatgaagaagacaaccgaggagaacggggccgaatataggaaagacctgacgaaatccgtgacacatcttattgcgcgcaactcggacggtgaaaaatacaaattcgcgacacaatggaatatcagagttgtttcggtgaaatggtttacggatagcatcgagcgtggaatgatcctggacgagcagaaataccacccgctggtacctgcagcagagcaaggtgtcggggcatgggatcgatccgcaccgacagaaagggagccttctcggaaggacagcactaccgaagagaactctttgaatccgcgacctcgaaaactacgcaggattgcaagtaccaagctggtagatcaaaacgaaagcatctggggagatatcgtaggaacaggattcgataataacgagacggctggaccccaaaagaacccaccacatgaagcatcgaagcctgtcatacaggcatatcagtcattcgccagcgagactacattttctgaaagcacccagtctcggcttccgctaccgactgctccaccaaaagacaatggatttttacacacgacttatttcttcattaatggattctcttctaagcaggtttgtgctcatcctcttgtccacatacccttgaaactaatgtatcttctagactaaagttctacgtgagcatctcacttataacggagctcaattagtgggctcactaaatgagttctctagccctactattcccaaaacagggcatgggctgttcatcatggtgccgtatcagactcctaggtcagaaattccgtcaacggatgaaatggcctttgaatgcgagatcgtgacagagatgtggctggaaagatgcattgatgctcgagcttttgttccacccgagtctcatgtggcaagcactccattccccaaattccctataccaggtgaggtcccatcaaatgcaatattcatacatgctctaataataataggatttccggaattgcgggtttgttccaccggctttggacgtattgatcttttacacctacgcaaactggtagagttgatgggcgccacatacggagattttctaacgccaaaagcatccgttctcatttgcaacgaccccaaaacagccagcgttgacaaattgcggcatactggcgagtggggggttccagcagtgtctgctgactggctttggatatctattcaaactggccaaaagaaggcattcgagccataccttgtccgacgacaattacccccaagtgctggcagcacagaggaactcggttctttatctgctaagcgaaagcagcctgacagacatcttaatgaaacgggttccccgtacaacatctctaccgagtctatgaatggtggtagaaccgaaaagcaaaattctggaaagagcgctgcaagtcgaacaatacccatcgtcggcgacggctttgaggccgatgcaccgaagccctccgtgccggagtctcgatctccaaccccggccaggataccagacgaacaaaccgcagtggaaccgaataacaaacagtccacgccaaatactgacccggcaccacccactggtccatccgcactggatacggctctgagcgggctcctacagcaagcccgcgctgccaagtcacgacaccagtctgagaacaccacgaccaatgatgacgaaaatccaccccgacgaaagcgcaagcccctcctcggccgcgccccgtcccactcttcggcgcgaatgctggaaggcccgcggcctgtctcacgcgccagctcgatcgatacactcaacgacgatggcctcggcagtgccttagagagcgcccacccgaccagagccaactccataacccgcagcaacagccgtgtcgaacaaagcctgtcatccatgctcagcgatggtaagtttgatttcctgaatgacaaactcccgacccataccgaggacgaagacgaggaaaatcaggcaccgcagatgacgcagctggattatgaagatcccgatgcggctgccatgagggcggagttcctgaggggtgctgggaagttgtctggtaaggcaatgaaggccgatagctcgggtttgcttgtcggtgaagtgcgcgagcttgaggatattgggtggggttctgggcggaggacgaggaaacagcctgttaaagtggacgatgaatgatttttgctttttatttttctctcggcgaaggcatggcattgcattgggaatggcgtcgtcctctttggtccatacattgttttgaaagagcgatatataagggttgttaatgataatccaactcggctctatactaagcaagctacatgtcccctggcctaagctgcatttttgatactagatattttagggataagaaggaatacgaagggatcaccaacaggagatattttgaactagatgcacctctcaatcgcttagggaagttagatgtgttggccactccgaacgatggttgtgctttgggaaccgtcgagggctacctgtagccagcggtgattggaggttcacacgtcgatgtgaaagatggactcgagctagcgttagaatgattgcaaaggcacctggcttgttattctcgtcgattcactccacagatcggtagaagatatgcacagtctgatgcattctgacgtgctcactgttgccttatgcagtggggttgggaatatcttcagattcgctacttacaaaacatggtattaagcggtgtcgaaggcagtctaaaattggtgagaactatccttaactatccagctttgctgttacaattatgaaataaatcaggtggcgcgcactggcagagtatgtcatgtattctataaaccacttcaaacaacaaaatatccgagaaaaagcatctcgagcaatgggaatacaagcattatttgtacgcaaattaacacaatgtaaaaataaccaaagtgaacaactacacatgctaaactattcacttgcccttttgggcatcattatgggcagcaccctcatctccctcttcttttcccattcttggtggtgaattatggtcagttccaccacgagaaagccactctagagaagatattgaatgggccgtatagtcgaagcttcaagaacgaattgagatcatgggggttctgaggtttgccatcgaaacgcaaatagtcaaggtattgcgagtgtatattgcgacagcataaaatgatacttgccaattgggttggctctggtacctacccgaatggtaaggcgccattgatcattcatcaatcgcgaatgtgatgggagaagaagtgatcaatcaaaagtgataatgataatgatgatgatggatggaagataaagacctagctactgccatgaagctctctatatagttccatgctacaaagccaccagattccatccttcagaaaccagaagaagcatctctgcaggcaaacaaagaaagtgccaacacagcaagctaaacgacaagctacctgtcagagaagtgaaagaaaaggaaaggaatgccacagagaggtttacaatattacgtgctagctagttactaaagcagtttctcaagtagttgctaaataagtcgctaaagtaattgaagataaagcagtaaattaagcagttagaggcaggggggagaataagccagtaacaggggtactttgcgtagcgttagaagttggaatcagtggcttcgctctgcaacgactatctggaggccttaggccgtcgagatccctagtatacattcgctctatactgagtcggaccttcaaatcggggaattgacaggctaagcaacattagatggttggattgtataaagtacgaattttactgtgggaaaaatgagtcatgacgcactggcggttggagactgccatactgggcagaaatgattgtaaagccgatgtgaaggaacatcgtggtaaaactcaatagaatatggagaatatgcaaaggaaagatgcgcactgtacaagttaggaggcaagagaaaacgagcggaaaacaaacatcgtaggaatcatgagtggttgtacaaaggtgaacataggcttatgcttgcattgccgcagccattcctccaggcaagggagcatcaagatccaaattctcgatagaacggcggttctcgctactgtcccggaacaggttagagaaatatttggtggcaacatcactctcttgcttgattttggtgacctcttgcttgcgtttgccgagatcctcaatatcctgagatagacaggtttgaagattattggcaggcaagcgcaacatgcggcgaacttcagtcgaaattcgattggcatttgagtggacatagtccatctcagcaagggtggcggcgatcttccgcgacaggcgtgggggaagggtggtcgggatggagctgagcacgtaagctgtggtcagaacagcttgtatgaagttagtatatgattgttctttgtgaaaacgaataggcaaaactcaccagcagcgaggagactagggaagaacagccggcgcatgttgttcgggccaatgactttgacagcactcaaggcactatccacccaaccgaatccgcccaatgccctaccaccaagtacagtgactgcagtcattgcaacgcctgttcctgccatcttctcttggcgctcccagagaccagcaaaatcgaagaaatcccacagctcaacttcagtgtcgacctgtcggccaaatgtgtggcgacggccacggcggaacatcgcatccgcgcggaagttgagtggggtaaatttgtcttcaccaatatgcagaagaccgatattttggatgaaaccgactccttgaactgtcttttcccgggcatagtcctcgcagttgttgacagacgaagcaatctcatccagcattgccagcttcagttcctcagcgtactggaacgctgaaaaaagaccaggatattcaacaccgaggtctgcatcagaaacacgtgtgattgtgttagtcaatgtcgaacgagtgtgattgtagacatcatcgcatgaatcgtcgatagccttgttgacaccctctgcaatctctcccttctttttcttgccgttctcgaatgccggtacaagctccgccaattcatcggtcactcgcttgagctccgactgagcaacatcgcggttgactgtggcaagagagccaatgtcagctaagagattcaggagatacgttttggcaggcgcaagcttggaccgagagcgcttttcaaggacgaaacgtcgcaaggctccttcaaggttctcgaagtcttggagtttctcccgttctttgcccttgcccttatctttggagtccttatcggcgtcgtcatcatgaggatcagagccaccgccgtcaccaccaccggagccagactgcgagaaggctgaaggtgcaacaggtatagcattgctcgaaacgaaatgaactagctcagcagcctccttgtatgtgcgagggctgagtttgccgatctgatctaagatcatgcgttcgcagcgtttcttgtcgcgaatttggtcgaatccgttgactaccatgaaaatatatgccttctcatgtgccgcattcaagatgaattcttttgcagacaatgtgaagtgatttgcggcggaaaccacaaacacaacgacgtcgatctcctcctgtcgagcaaagacagccgtggttttcaacgagtccgagtttaatccgggtgcatcgatcaaagcgatgtcaaccacgccgttgttcagcaatgattcgtcaatagaccgtacatccctgacgtagactttgcactgcatgtacttcgtgttttcgatgacgatattttcgagttcggtgagagcatagacatcgaaggtactttcgtcattgcggttgtatggcgtatctttatgaacggcgtggacttcttcaacgctgcaattttcgcgagcatcgagaacctcacagaagatgctggtgcaaggctgttggtcctctggcaacacctttcggcgcagtagagcattgcagaatgtcgatttgcctgcgttcaagtctcctgtaatcaggaccttacttgaagtgtcctcaattctatctcgcagcgaaaggagatgcttcatgctttggctgatttttccatccaacagggcggcaaccgatgccttttctaaggaatgtactagctctgcctgcgaaagagcgccgagcttaagatccaatttgagaatagagaactcttgcgcaatctgcggggtcatcaatctgggctctgtcggcacacgacgttggaccgaggcacttgattctcctaattcgtcgctaactgccaaggtggctgcacgcctcaggggcggggtgctgagtatgttatcattgcctccaaattcggattgagtttgatgtagtgacggtcggaccatgggggaagagggtgtgctccccacggagggatagtgggcgggccattggcggttcatttcctgaagctccttcagtgtgtcgatggtccgggatatcgcacgagcaagcttggttcggtttgagttgctggaaaatactgtaagccttggacttgcatgaatgatttgtttacggggaggggagacatactagagaagttgagagacatgactggcaaccacttgcttctcatgctcagctatatcccaagatgaattagctcaattatcttccctttatatcacaccattccatgtccgtggccacttacctgcgggattccattctccagggcgcgttggagtatgcaccggagtcggcctatcctccatcaatcctgcacgccaagcagagttcgcatcctcctccgtatcagcaatactgcctccatagccagaatcttgattgagcgaagtcatcagggctgtggcactgtccgaagtcgaaccgttgcccacagtcatataagtcggtgggggacggaaaaaaggattcttctgaggaaattcttcctctcctgagaacctggacgagcccgccccggaagacgggccttcaccagggtgatattcctgactcatgacgaatgaaagacctcaacgtgggggcgacatccatacaagagaagttgtgtttttggtggtttgattatgagatgatcgatttgtcggaaggtttcagatgacgtcgggccaaaaacggattagcgtgcatgtgacccggtatcatagtaatgcgcctgtaatattaccataccgcgattgatgtcactatctctactcaggctcccatattgtacctggatttacttcttacctcgaaccgactgcccataatcccctgcaatcatgaatgtaagctgcatattgaatgcttaaacatggatattcactcacattaggtctcctagattgtcgagtgggctttcggaaagcgcatgacccccgcagagcgtctgcgtaaacaccagcgtgccttggaccgaacacagcgggaacttgaccgagagcgagtgaaactagagaaccaagagaagaaactggtacaggacatcaagaagagtgccaaaaatggtcaagttggtgcctgcaagatccaggccaaggatctggttcggacacggaggtcggtttctctttattgtttactgatcaaagcagcattgactgactgcgacaacagatatattcagaagttctatcaaatgcgcacgcaattacaggctatttctctacgcattcaggtatgcgcaagctttcctccgctatccctcttggttccgcgatgcgctgactcttgctgcttcctagactgtccgaagcaacgaacagatgatgcagtcgatgaaaggagccacaatgcttctgggtagtatgaacagacagatgaatctccccgcactgcaacggatcgcgatggaatttgaacgagaaaacgatgttatggaccaacggcaagagatgatggatgatgcgatcgacgaggccacaggaatggaaggcgaagaagaggaaggagaagatatcttgaaggaggttttggacgagattggtgtcgatctgaaccaggcggtttgttgccccaaacattggaaagtggacccagcaggctaacatattccatctacagcttggcgaaacaccccaacacatacagaaagcaccagtgaatgaaactcgagttgcgcaggctattggagggggaggcaatactagtgatgatgacctccaagcaagactggacagccttcggcgatgattacgactcttctctcttatatgccattgatgacggaggtgataatgcgacctgctgttttgagccctaattgagattacttgccttgctgttattattagcataccttggaagatattctaaataccaatccatttcctttcaacctcttcacatttctctcaataggtcaagggtgcctagccgtgaactagatatttatacataaaatcgcattttggctacatactgttgaacaaaatggtgactgttttctattttctatggtacgagtaataggacagcagatcgctatcaaactcaattcgactcccagatctaatactccgcttgtgattgaaacaccattcccgagatataagattggaagctttaggatggtgcctcttcaggagggggaacttactcatattcacaatcatcagatgcgctagaagaaccagaggaattatatctcgggctgttgaggatggggattgatataccttgatcctgtgatatacttggccatggaaaaccccttcgaccatctgcacgggttttatcatggaatttcttgataaagggtcttttcgaaggtcgaccagactcgagttcttcagcagaccagcgagaaaaccaaggaaatgacgatagctcttccaacgacggccggtcaaatttatctctagccaatgtggcttgcagtacatccctgcagtcctgtgagagtgattcgctaattgctacatcctcgttgatcattctcttgcgtctgcgtttgactactggatagaacaggtcattgtaagagccatcatacctagcgtgccagttcaaactcctcggcactggtttaggctcatcccaggcccagaagccatgcagaaacccgtaaaccagcgttgaatatttccacaggcaaatgtcccgctggtcaacaggtaagtagatactttcgatagagacatcatcgtgggatggatccctccaaatgtcgtacttctccagttcgatggctcgctcgggcatcatttggtactcttggtagggaataaagtggtctattttcattgcaaaacctgatttctcaagcgagaagtagagcattccaagatcgattagttgaacgttgaggttttggtccattaggtaattcgtcactgagatatcagcatggcagaccttcatatctgctaattctaccatagcttggagaagctgagaagcaaccttgcaaccttctatttcccccagttgaggttctttggtggctgcggacataagatagctgccatcaaaagatggaaacggggggtatctctttcggatgcgcggtggtatggccccctttgacttgatcctgttgaaatgaccctcatcaataactgaaatggcttcatagctaggatcaacgcagggggtcatgagaattgctgttagcataccgtgagtgtagaccgagttgagccgcgggaaccttggactatcgtcgagatagatcagaagaagtgcttcttctggcatatatcttttctccccactagcctcatagaagggtcccatctgagcattcacacccgataatgtgtccatccattgtgttgtgtggatttgagatttgattgcgaattgttgaaggtcctccagggaagcaccagcagcgcctttctcgcgagcaataaatgtggcaccaaatgctgtgatcagttagcagtatatccatgaaaaagacatcacatcaaggggaggatggacttacttcctgcgcctatgaacccatatatctgcactcgctcgataaggtgcggacaaaggcatactgctttcgcagtcgtccgcccctcagcacttaaacggatgaaatccccatatgaagtggagttgcatttttgaaacacttcgctgtcgcacctatgacctgaatcgtcccggcaattacacctcgagaattcctcgttattccgtttgccaaacgctacccctagacgctctcgaagaacctgacttacttggggatacctttcggacaatcggcttgaggggtctaaaagtctttcggcattgtaagagaagctatcatcgtagtcctggtatttgaattcgcgggcctgcgacgatggatggtgtaaagtatgattccccttgattgcgcccaagtctctccctaagatataatcaaaagcgtaaggatcctgttcattaacgcccatctgttcagtcatggcagttgattaaattagtcaaatagacaaaagtgatgagtgcagtgagggaagtccaaggagcaaagtaggtcgtttatataaaactcccaaagaatgttcaatgtattgttctcagaatagacaaatgaaaggaatccttcgaaacaattcttatgaatatcaaagagttcctttttagaacaataaacaaggaggtcacctgtaacaaaattaagccactaaaatcttatatttctcagatgatgttcgtatccagataatattcacccgggcgacttgggatagtcatgaggctgaagttgccttgttttgagcctctgcgcccgggcaagaaacgagaatcgggaaagagaaaagtcaagtatacgagcaaacaagatacataaataggtgtctatattctcctcaaagagtcagatttcttcaaacagccgactttcacttcaaaggaagaaacaaagacaatcattcaaccctctgcccttaccaacaacaattcgatgcaaacctcaaaggacaccccaaacacaaacccatcgtttccggtcggccatttgcgatatgaccagaaatgttcggcctccgattcagcaagtcgtgtttacgagggcttcacattttccaaggctatgctcgaacaaagttccacatggatctgtgcgaaacggacagacatgcatcggaatcaagacgaatacttcaaaatggttcatgagggagcaaatcaacagtctgtagcgcagcaataccagagcatatcctctgatatcaggcgcgctcatgtgaatcaactgattgccgaacaaaggcataacaatccactcgttgagtggagttgcgtctacgtcaaagaacacacgcagatgttcgaggccggaaattctcgttgcgcttactatgagactgtatctatggatgtcatcatcatgcaaagaccgatgaagacccaagtacattccagaacctccatgggtggtccagtggctactaggaaaaccttccggccggatacaaagagttcatttatgtgctctcgtcacagggacatttctctgacgccagatcaaaatgggaagatcaatgccataaacagcagcggcatgagtcttgaagatactttagattgttcttcagaaagtaatagcgacccagatgatgcatctatgctttctgaccaatccgatgaaacatctgcaacagacgaccgagaaagaatggagaccgagaccgagaccgggaccgagactgagtgtcaagaaccgcgaccaaatcaggtctttgtccaaaaacagaatgccagtccttatcgacgcgagccgagtcatggacttcattttcggcgaaagtcacaaggatgcagcgggagccttgaaagaaggcatggcaggaattatctccgcgatcagtttgaggtgtctccagtcaagattcttggcccacgatgggctgaaagggtttggtcaggctcggtgcctagtagaagatatcgaatgcaggtgatgaacgacaatgagattcgaagccgaatgcttgatcaccgtgaagcatgtcttggacatcgggagcagtggctgaagagagccttttctgaagcgcgtcagcttgagcgtcctcaaccggtgacagatctgccaacagtgtgccgctgtacctgtcggtgcgcgatcaaggaggatgtatgacagatatattattttattttgcatactaatttgatatggctactgcttttttttcctaccatgagaagaactgtttttaattgcatcattagtttggaatagtcagatttatataaacaaaatttgatcagtcaggtttactaaacgatacacccttcctatttagtgctcatcctggcacagacccacattgagatagtccccctgtgctgcttatcaagtcgtaactccatacctcttgctgcgttgctcaattgcagatctagcggttgtttctgcctaggaagcacattacaagaatagcaaggataatgtacaaaacgcctaagtcgaattagaaatgcaccacttgtgttggaagggatgacttactccaagtcaagctcatacaagtataaccgaagtgttccttgagggatccaccgatgattggtcccagaactgtcccaagcgatgcagcaacatcatcaagagagaaaacacgcgacatgcccccttcaggtccgaagataccaggtgaatcctcttgataagctctcacaatggctgtcaagagtcaatagcaaatactaaagtcgggataaggcagcactcaccggaaagttcgacggggcccacattcgtggtaaaaggtcgcgctgcaccaatggcgagaatgcagcctgtatacaacgctccacctccggcctgagtaccggtccaagggagaatgttggtaccggctaggcccaatagcccaagaatcaccgcttgaaaacccgcagaagccatagcaggataccggactccgaagcgatcacgcaaccacccagccaatggactgataaacagagttggcataatgagacaagagaacaagaacccgctttttccggggccccagccgaatgtttcttgcacatgaatgggaagggtagcatggaagctcgtgccaaccgttgttgtcgacacggcaacgaacaatgcagtcagcgctcgaacatcagtgagaataatatgccagaagttccctgcggtggatggagtttgggcgttctcgggagcgagtaacgggctggtagtgtcatgcgtttctgatcctgtcgattctcgcttgcaattggaattctctactgatcggctttcgatcatgataaaacgcgcgccaaaatctatagtgagaagcaagagcggcaatgaccacgtcggccaatagcctacaagttccaagagcaaaccagaaatggatggcccgcctattaatccagtatatatgaaggacatcattaagccctcgaccttacccatattatctccacccacggtatcagccacggtcgcgaggccaacaatccatacggaggatccggcaatgccctgcatcacacgaccgacgaagagaacagcaagcgaggttgagccagcgaccatgccagtaccgatcatacacgcgacaagcgatagtagtagtgggagctttcgattcgaggttttatcagcgaagtggccgatgatgggacctgaaacaaccgagacgattccatgcacggcgagaacaagtgacgtgagttcctggatcctggattgattctcatgtagtcgcgtacgaagcatgtacggtaacataggcacaaggaagccatagaggaatgtttctatgcactgtcagccactggctcaacaagagggcacagggtacacgaaccggcgaacaaggcaattgcgactgtcgagagaataaaccatttagaagagcgccaacggaagcctataggcttactactggcatggaaatccctcatgtcgacttgagttgtgagtagtaaagttcaatgccatgaaaatgctataggaatatcatcatcgctacaaaagcaaggtttgacctgcaggatcgctgatcctcagctgggggcagttcatgcgacgataatgcagggatagtgcagccgtatcagactagtattgcccagtcttatagactacgaatcggactgaccgggtctgcagtctccacataagatcgagggtgaaattgaaatgacttatagaactgtggagacctgagggttatgctttttgctcatacctattggtccatgtctcatccaactcgtactaaagtagatgattctattcttttttcctttgaaaacaaggctatgaatgtcccagtgttcagaagatagtacttggtacatgcgtgacaattgtagatcatcgaatatcgatcactttaacattctaaagagctccaagtaagacgaaagagcaggcatcatctgcccatctcgacctgacagcttcagctaatctagtcttgtgtcttgtcgatgaaattaatcactttccgtcccgtagtgcttctgatgaatcccgaataatcacataggtatttcaaatcgaagagctcttcgttgttcccaaaaacggtgaagaatcttcgtaactcctgtgtcagttcttcttcgccaatcgtgcctggctcatcgtgccgaagcacacgcagctcaagaacaatgtcgagatggtccttatctccttcattatacctccggatgatctgatactgcaaaataccccatgactcggttcgtagtgcagcctggacaactgggaattcgaagtactcgccgtaccaatcaaagctgattcttcggtcgcgtccataaatccgcgcgactttgtagtgaggtgcatcttccggtgagattttggctttgataaactctggcaaggagtggagcgagcaaacatcaccacagacatagcggatgagaggatgacgcagtctctgcagcgaggtttgcacaagcagccctttctcgccatcaggaagaggccgaacatcgacattacatgggtcttgagggtcctccacagcaaaagggaatacctcaagatgcatcagacgctggtcatacacaaaatcggcgaagtgttgctccttcgtggtctctgtcagctcggctggcgaagcggcccaaggcccagcttccgcactaccaattaccgacgagacagctatattgggaaagacagagttcaaaaagctgcgctgggccggggtcattggctctgaggtatacagcgccttgtttatcagcagttgccttctcttgtcctctgagagggtagagatgtatcgcgctagctgaatgatttgtcctgcgtcaccggcaatggcatttactcgatatccaatgagtgtctcgatcatctggtcttgctccatctggctgccagcacaaagaaccgtggcgccagacccctcgagcacctcggaaataaggtccaaagccctgcaagagttaaaatcagtttttccccaattgaatgaatacaagtcaaaaattacctgtaaagatgtcccgacacgtgcattgtcatgatccagtctcctggtcctgtgatcccacaagatcgcaagagagatccaatggctgctcgttgttgacggatctctcgcgaatccgttgcaaagaccattggaggccctccaccagatcctccaccagtcgtgctgatgtaagttccttgtcgatatccatttcgagggtcttggtcagtggtaaggcgagcgatctccttgtatctagcacttttagctatgcaggaaagaaatgaaagcgggaaagcttacagagcttctttccgggtcaatgggaatgctgatagcttgaagtctgttgctgactctttttgctttgctagcagaataggtaaatcttcacttttcgttggatatggagtgtcagaataaaacgggtggatactggcaatggccagaatatcgcccaagtcgaagcagttcgtcatcttcagataagacgcaaacttcaggtatgagcacagtgcatgctacaatcagcaaacttgagcatttatgagctcaatatggaagtatttattagtcaattctataggtaaagtgggttctggtggcgggaggtggagtacattattcaatagtagcgtcgcgctaatgtgcctataaatgtggaccagatggagacccctagggatgcagatcgcctcatgcattagtatgtactagtattcattagttgtatcaataccggtgtatttgactcaaaaacaccagtgaggtatacctatatcaagaccgccacttaagaaatgcagccgccagaatatcatgtccatttagaacaacttttacatcaccgcgggcgcaactatgaagaagccagtgaaccactttagcagtatttgctttccccaaagtggtgaaaatttctttcacccagcagatattgaccccgagactcgatccgctctacttgagaagtatcatctcgagctcgagaagtgtagccgtcgggagacgtgggctggtgatgcccaccataaatcggtgccttatccagtgcttggcaacgaagctcatcaacgtcagctttcagagctaagcgaggcattggttctagcaattaccgatattgtggaacgatggtggtcggatgttgaggcccgctttccaaagcggatgccggtcgaaccagttgaggaaaacctgctgcaagtgagtctgaatccttggaattttgttgattcttgctaaagtggtttagtggatgcaacaactggatgcacatgtacttcgtccattcagatcctgtcaaggctcctggaggcccgactttctgcttgaatcgtcggatgaccccgagcggatcgagaattatcgaatctgcgagatcaacgctcggttttgttggaatggattcctctttactgcatttggccaacaggcccttctgaatatgggtgtcgagcaatatggtatcaagggagccacagacccgcaaaaggtcagaacctcgcgtgcctatacataatagatactgatacagtacaggtcattactggtttgaacagcctttttgattcttcactccccttacatctagtcaagggggaggagtacggatacgatatccacatgttcgtcccatatgcacagcgttgcctggggatggatgttaaagtcattcctcccgagagtctccggttgatacccgctgcagctcccggtggatacaaattgtactgtctgtctggggaaaataccaaacagccgacaatattgaatgatgccggcgagtctttagaagaagtgcatcagctaggtgtggaactgcatcaacgagagttgcttgccatgagctttgaaatgcttcagcaaatcagcctgagatgtttcaacgacctgcgtactgtgcttctcgttcatgacaagcgcatgttaggcttaattcaagaagagctggattcactggttgcacgaaacgtactctcgccgcaccaagcagggatacttgataaaggacttgtccacacgatgatacccggatcagacaaattggagcatttcatatccaggtgccagagagacgtctttaccaaggacaactatctgcttaagccagttcgcagcggtaagggagcggggatcttatttggtgatcaggtcacacaggaggagtggatgtcacttctccagggcatgcgagatcctcgcctaaaatctgggaaaacaacctatgttgttcagaagcaaattcaacaacggatatatgatgttctgcttgaagaggacgctggagttggaaactttcctcttgtcggaacctttcacatcaccaatggcgcattcctcggccttggactctggcgaagcggccccggtcgaatttgtgctttaagtcgtgggggagcctggatgtgttcagtgattcaacagtgacgaagactgatttccctggggccaatactgttcgagccatctcatctcactatctagtctgatttcatcttacgctataagatttgcccttttgttactttggttcgatgaagatactttcagaaatgaccaggcatgcctaagatcttagatgggctgcatgtaactagcttaccccgtataactaggtgtggactatgtgtgtaaggtccatgtctctgtagcatagactagatctacggagcaatcaccgagagtgcagccagtgcatcggcctccgccaattccgaatcgtcaaatatcaacctcacatatgaccgtattggtacatgatacacgatacgataaatgtcagcttggttcagctgactgaggaagcgtaggtaaagcagggagtggcgtaacaagtatccactcctcacgattgattatgggcatgagaagaaaccattagcaaacgaaaaccttctttccgacgcatccaatttcctcgcaaccgctaaagcagtgagatctgcttgcatatggagaaatcatactttagctcagccgtacttggtataatgtcgtgggtcaatttttgttccaggaatgtggaggtggctcgcgagcaagcatgatgaagtaggtgcgagggatgagcaatcgtcggtatatattcaatgtataaaacactctggtacccttggtcctcgccttcttccatcctatcatcattaataatggctacaatccaacgattaacgagatctctccccacgacaaggaagcaagtcgttcaagtacctagaatatgtgagctttgagtccacactcttctccccatatttgctaatgaaaattgccattttggacctatagcacgtctcacagtctcgaatcctgccactgcttcccaacatgaccacctgcgtactgtccatcacacccttcagagtgccggcgttctacaaatccaactcggcttccccgatgacgaaagcacttaccttcacaaactattattgaatttgcaccaacaccacggccatggactaccgatcacacacagtgcaaatcgaggttggatgtgggacattcggcccagccccgaaagcttccagagcaacaatactcaagctcgatctgagaccatggaagaattcccttggcacacagattgcagctatgagagctctccaccgcaatacttcgccctccaggttcttcagccagatcgatgtgggggcggtacattatccgtcttgaatgtcgacgaattgctcacacttctctcaccttccacccttgagaccctcttcagccccaattttcagatcactgtcccacccgagttcgtcaaaagtcaggcagatacacagatcgtcggtggcctgctggcaattagccccgagacgaacgccatcaagctccgcttccgggaggacattgttgtgccgctcacaaatcaggcatctgaagcgctagctgaactgaaatccgtcctgttgggcccagcagcccattcccgaatactcaacttgagagccaagaatctcccgcgtgggtcgatcattttgatggacaatggacgctggctccacgcacggaacgaagtcaaggacccagatcgacatttgcgacgagtgcgttgggacgctcggcaatttgccagaccttccgctgctcatctaggtttgtaattgcgccatgagataccaagcctgcgctcagcatgtttggttgcattttcttctcataattgagattatatagtataactcaatgcatttccggtgtcattgtcacttgcctatactattgttttgaaaatcaaaatcctttctcgcaccatctactatgtggatcttctaagcccgattgggtttgttatccagccacgtaccttccacagtggccgaacaatgccgaggaatggactcctctttcgatggggcttcagctgtaagaacacgggttcctgacctgtaccttgacccatatatatgggttcgccccgctggatcagatttgtgttttttttccggtggtacagggtctatctcccgcttgcaaagtctggatggcatcggaactgcagatggcagatcgaaagcgatcgacacaaagttcctggatttggtagcatattggcaatggcaaatgcccctggcgttgccatacagtgagtgtatgtactccgtatttggcggtactctatatagttaccgccatatataccgcccacttgttaaaatactaccataggttaactagttatgtgttatagaccggcagaactggcagaattgaaatagcggtacggagtacggagtactccgtataatgcaaaatccttcccaacacttcagaagtcccactgtatatgcgcgcagctcgcttaaatagaaagacaagtgctcaaccaacacccagtcttcatatcacatgcgtttcctaatactctgagacacccccaggcttgattccagaaattatctccacatttgtatgttgcctaatccgtgagttggctcttgctgggaaggaagctcagggttcactgcactctcggcgtactatattaccttggcaaataaccaatgtcttggctgaactcaatgttacagtttgtgtgtgtataatttactatgacccatcgcgggttgaatatcacatcacgtgacatttatagatccaatgactgacatcttccttggctaatattctgactactttccttgactgctgtgtggtgacatagaaagacgaccccgatcttgggaggaagtgaattcaaattcggagaattcttaggcgagaactgagacacctttctcaagcatagctatcttatattatccgtcggaagagcataactatctgaatagtacagagtgtctagtatcaatttgcttcgctcgacatcgcagctgcagatctcgcgtcctccttttggaggaccaagaaaaacaaggaacagatatactcgagtttgaataatgagcagtatctattacatctttttctggagctctgccttcaggacgacttaattacctagtttatacggcagtagcccctcgttgaaccggaatttcggttatttactttcaagtttgttagtggaattctaaaatcgttgtttgcgaaatgtctactccatgcattgataatgttggagctgtcacaggttggaaacactctagtaagaatgggtctatacccaatcaatagtactaggaggagcgctccgccaactattccatgaagacttcaggaagagacaagcaactgcgtactgcaaggagagctttccttggacaatagaccaaaaatttgccattctaggaacgtctagagtcacttaccttgcacaatagctcacatcctctcgtgatgtcttttttgtatgtcttctgttccacaacgataaaaggaatagaaaaaggcgttaggagtggctatatcatctcgtgataccattgtggtcttagagcaaacaaataaaactcgtgatatgtaattctgaagactaaggccgaatttttaagtatcttgcttacagctctccgagtatgagaataagacataaaggttcagaccaaaaacttcatatataaatggccctgtcatctaaattactggctacatataacactctggcgtctttcccaagcgctgcctacttgctacttgtataaatcgcccaagattgttcaatccctcgctcttgatcatcactgataggctcgaaatcaacagcgctggtatcttgttcatcctttagtgcttgcctcttcctttgagagtggacacacaaagaaataacattatctcttgtatcgtgcttggtttgagatcgacgataatggcagacatcacgagcagatttagatagccgctcaacgaggaatcgagagcataagagatatgatagttgagtagtagacaaatcgagtctgaatcttttgaccttgaccatcattagttgtaagcttaagggtcttgagtgcattgggggtaacctcaagagtcaagaccctccgatagacttgtgaaattcctcgcatcatggtcgaaggaagtggctttgacaagatgggctcattcgatcgtaagatcggtaaattgaaaagaacagggacaacgaagattattacagggctgattgactaaatgttgagccaattgatgggatgtgaacctggggccataggaagacagtagcctcgcctttactgtgggtttagctttgctggcatgttgggccgcagtatgttgtaggtatggtaaagtactgagtggaggggtctttctatgttggaggggcattaagggatgacgtaattgagcgctaaacccagagaagcaaaactaacttgaaagggaaattcatcgtttacataaccgatttactttcccagagtcccttctcccggccaagtcttcttcttcttccatagctatcaacattcctgaaacttcttctttctcttttccatcccctcataaactttcaatatgcctcgccaattcttcgtcggtggtaacttcaagatgtacgttgtctcaagctatgctaccccgcggtctcaagcccctcacattttaccaatgcctactcgttcgcgcaattgaccctataaaggaacggtgttgctaagagcatcaccgaaatcgtgaagaacctcaattccgccaagcttgacgacagcaccgaggtcgtcatctctcctcccgccatctacctcgctctgacccgcgagctggccgaccccaagattggtgtcgctgcccaaaacgtttacgacaagcccaacggtgctttcaccggtgagatcagtgttgagcagctccgcgatgccaagatcaactgggttgttatcggccacagcgagcgccgagtgatcctgaaggagtctgatgatgtatgcataccccgcagtccccgaaaccccaatcatcctcaaacactgcagccgaatgaagcatcaactaaccactgccccaatagttcattgcccgcaagaccaaggccgccattgagggcggtgtctctgtcatcttctgtatcggagagaccctcgaggtacgtcattagaacccggttttcccattttcgttccgatagtgggtcatcgggtccagatcggctatatgtcttctgaatgcatcccgctcacacccgattcttatgtaggagcgtgaggccaacaagaccatcgaggtcgtcacccgtcagcttgacgctgccgccaaggagctgagcgcagagcagtgggacaaggtcgtcattgcctacgagcctgtctggtatgaacttatcgcattgcttctaaatcaacatacccctggacatatctaacatgtatttgtagggctattggcactggaaaggtcgccaccactgagcaggctcaggaggtccacgccgctatccgcaagtggctcggcgaggctatctccgcccacgctcaggagagcgttcgcatcatttacggtggctctgtcagcgagaagaactgccgtgagctcgctacccagcccgatgttgacggtttcttggttggcggtgccagcttgaagcctgcctgtaagttcttagcacctgcccatctaccgatttgttcaccaaattggtactaaccaacttctacagtcgtcgacatcatcaacgcccgcatctaagggatttccgaaagaaaccaatacccccatagtgcccctatcatcagagcaaaaagctctgtgatgtaggcgtcagaagataacagcttggaaattccaggaaattatcacgaatctatgtacatttctgaagtatatttcgataacacataatcgttgctacccagcggagcagttatttccttagccaaacagactgcccaatgatatgcgcctagacaacacatgtaacctatgaagaatacaacaccgagaccccaaccccccgccaatacgacatgccaggacccccacctccactctgggccgagccggtggccgaaaccgaagaagcagaaggcgacaatgagaaggaacccggacctagcccaacacccgcgctcactagaagctccttaacacggccttcccagagaagccgcacattccaagattggtcaatgcgcagcttaatgacagaatcacttgtctcggcctcgccgtgagcgttggagcctacggggccttcaggttgagccgggtccgctagaagcggggaagccggtgagccaggcagggaaacgctgaagtcatgcatgcgtactttgcggcgggcccattcgagatcgtcgtgactgggggagctgggattcttggattgacgccatagctcgcagccggcgaccatttcactttcccagctgtagacgttaaagccgaaacgagagctgaaggcaaggttaggcgaggcgcggagggaatatgttgtagataaagagcccacaatcggggccaatgttagtgttagagtgtaggggaaggtcgatataggtgtccgggtgctggaatgtgatgatgatggcaggacctttgtggctgcgggtaatgtggtgaatcgcaggccggttgacatgccaatcagtgatgatatcggggaatagtacgcctctgcacctgcggacaggagggacgatggcggcgggacgtcgtcgtgaatgtatcgaggatctgggccgaagttccagagtccgcgccaaccgaacagggcgttgtctgtgctgaagaggtactcattgctgtacttgcccgtgtcgtgggatagctgggtgagcattgaggcctgtggagcggacttggattgcggtggtccccgagttgagcagacagctagcgacagctgcatattcgtagagattctgcgtagaaagagcgcatatagagtggagggaggtggaagatggagagaagcatggagcagagtagctttacgctttgcctcgctttcttcgctattttcgctattttctccgtctttaggatttggtggttctgggtggcttccgtctgtgagcccgggaatgctaacgccgtctaagagcgagtcatatccccaggtctggattggggccgcgggggcctgcacttgacggtatcccgggcatatctttcgaagcgggattgacgcacttctgcttggtaggtcgttaaatggcacggtactaaatagatatgacacagatccatcgagcaagccaacggtgccaagtgtgtaactggtcgcgaaatggggagtggacagtgacgagaggtgaacgcgcaaccgttcgggggtcgagaagtccaggatcgctgtaacaactgtgttaggccagcaacttccatgccccatagagagactttggggggataaatcaattacatacattgagcggtggtgttgagtgacgagtacgagttgtcgcgattccagtgggtcgcctcggcgaaggacagctggatgtagtccataaagtccagcattgtccaggctcagcccttgcaggtgacaatatgactagcaccgtgaaaccaaacaagatcgttcgtagcaagcgcaattgaagacccgaccctgagagatcacagctgattgccccattcaggttagcgttggataagcccggcggtgggttaatccggttatcagcgaagaaaaaatgtctgtgggggaaacatctaaccttctgcctgaattcattgaaccaccaattccaaaatcataattcaatatgcctcgttcaaagcgtgcgcgcatcgtccacgagtccaagactgccaagaaagatcacaaggagcagacccggcgcctattcgccaatatccgggaatgtattgaagaatatgatcatctttttgtctttgcggtcgataacatgcggaacacctatttgaaggatgtgcgcactgaatttgccgatagccggtaagaatcattgctccaatcggaatttgcataagatattgaatcggaaaaagcgcttgatcaacagcggtggatccgatatcaaatatttatatgcaaatccttcaaccaaaagatcagttgtctaattatgtctttccagagttttcttcggcaagaccaaggtcatgggcaaggcccttggcgctgatgtcgaaagcgaagccgctcccaacctgcgcaaactcactcctttcctcgccggtgccgttggattgctattcacctcccgcactccggaatcagtgatcgactacttcgagaacttccgtccccaggatttcgctcgcgctggaactgaagccactcgctctttcactattcccaatggcctggtcaccgcacgggccggcgagatccctgctgagcaggacgagcctgtcagccacaccattgagcccgcgctccgcaagctcggtgtccccacccgtttggtgaagggcaaggttatgcttgagttgactgagggtcaggagggctaccccgtatgcaaagagggagaaactctggactcgcgacagactacgttgatgaagatgttcggtatcacctcgtccgagttcaaggttgacctcaaggcctactggacgcggagtactgaggaggtcaagatcctcgagactgagggtggaatggatgttgatgcatagatggggatcttcatatttttccgttttttatttcttctctttcccattcggcttccgtgtggccgaaaaaaagaactctgctgggcatcttttggagtttggtgagggcgctttctttgcaaatatattgaagacttgtgtgttttatctctctttctctcgcatccttatacaggaggctttccctcctgctggattatgagcctatgacaagattcggataccaggtcgaaaaaagtctacaaatttacctcgttcttggacatatatcaaccgtagtgcagaaccgctagctgtattgcctagactttcatctatctagcaagatacctgcctttcagtcgtttcacatggtccttacctggtcttacctgatggttcaccagattccatttttgcgcggaagaggacagaactaaaatacaatacttacccctgcagagaaaacgaaatctcataggaccaaggggaaaaaagggggaaagaaaaaaaaagcattggaaaacgagtcaagaaaacacgaagggaaataagaatagatagaacggggaatacaagcacaattcatgagaatctccgtctgccgaggagtttagatggaccaagcaggggatgtggtgaataaccactttgacatcgagttgtgatgttggtatgaggtggaaaacattgacggttgtgagcgttcgaaatgaattgcacatgggccaattcatgatttacccccttacccttgagaaagagtgatacaactgggtagatcagtgatacccaccagtacaccagcaaacccagacttcatcggaaagaggtaagacccgggggataagtgaagggtttaataccttctcctggaacgaggatcatcgtgtccaggttcatcctcacggtttcgcttgcgtccataatcctcccggccgccgtcacgaccgccgtcacgaccaccatcacggccaccgccgccatacctgtcaccacgttcaccacgttcacggtcccggtcgcggaatcggtctccgtttcggtctccagtgcctcgatctcccatgcggtcacgatcacgatctctgtaacggtcgtcacggtcatagtcgcggcggtcacggtcagcgtagctatctcgaggccgcacaggctccgaattgctgccagttgcaccacggtcgaatctgccaccggcgccaccaccgcggtcaccacgatcaccaccgaagctaccacctctgaaacctccgctacgtccaccgccagggccggagggcgcgttagggggagcctgtccaccgaagccgccacggttgccctggtatccgataccaccgcgaggaccaccgaagcgatcattgccaccgcggaaacctccaccacggaaaccaccacctccacctctgcccccgaagcctccgcggaatccgcctccatacccacccggtccagatggtgcgttgaaaccaggtccaccacgggggagttgcgcaaccttggtgtatccgcgccctccgagaccgccaccaaggcgacggggcttccaccccttggtggtgcggccacgctcgacatctaccacaactggtcgtcccttgatactgaagttctctgtgtctttgtaggccgctgatattgatgaaggaactggggtcagcaacatttcttaccgcaagacgaattaaacgggtgggttggatgccaagtaaattgccatggttgtgatacctttcatatccttctcgcgctcgaacacgacaaatgcatagcctctgtggggtttctttttcttgtctgatactgtatctttgatgatggtaatctggaatcacaaagttagagctgtttatattcacaagggataaggaaaacaagacatactctttcaatgggaccaaatcggccaaactctcgttccaggtcagcttctttggcttcataactgaggcgtgagacaaagatagtcctgaatgggtcgcctcgagcttgaggatctttatccggattgtctgtaagacatagccacgttagcctcttgaaataatgtgaaatgtgaaaagaggataaagcgtacagttttgcagtccatccgctatctgcttctctaactgctctttcttctcgactttctcgcgcaatttgcgctgcaccccgctttcagttgcgttgtagggaacttcatcggcaaaagttttagcatcggcaaggaactgggcaaccccagagatagtgctcttctggcagtcatctggtgcgcgatcgcctggaggcagatatcgaaggggtggacgcggctggaacagcgccagaagtggcgggggtagcttatccgtcatactgagtgtgaaaccaatgcagataaagtggggatgtgaagtaaagacgatatgtggaagatgagtgaaacctcaggagtcagagcttcgtgtcgcagttgtggtcttagcgggtcgaatgatcaaagtgctgcacacgccattggtagcgtgactcaccgcccttaccaatcacgtgcaccagaaaatgccccgagagccatcgcgacttgtaaactccggctataactattgacgactggaaagatgccgttgcgcggaattagaacatctacggcggccagggtatgtgaagtccgaatgtttgatattcaattgacgaactgacccaaatctgcttagaacggcgccggtgccttcatcctacaatgcaaacgccttgacttccattactgcaactgggcgggcagctcaaagggcatggtgtaggtgtatcctaaatggtgaaactgaaactttccagaaacatccgtactaacattgaacatcgcagtactttcttagagaaacacctccccgctttcgcccgcgagaaccctcagattgaaatccgtgtctctccccgaccccagaagcaccccctgattaagggcctttatatcaatggccgtgagaagcccgtgtgtgtacggaacttggaacctcacgaaatcctgaagaaggcaattctcctcaaagaagctagtggagagaagttgaagcgggtcaagaagccagtcacaagtttgaatgagagtgtgcgtggtatctggtcaccataccacggtgatcttcggggagtctagacggttgtattttattatttacggttcatgttctctctgcggtggtgactatcaggtatccccactgcaacctactgtactattgacctgggttgtgtttatttcttcgttcttgtctatttgctccctggaagccaatggtgttttgaaacccatattttatgcatacaaaacttgagcctatatcaattctcttccatgatttctctataccggaggtcaccgaaagtttggcttaactccggactccgggatacttctttcatccaaatccgatggtcacatatcttattagcctgatttggatttgaaagcatacatacgtgcctaacaaggctggtgttggctagcttattgcatggttcgcaatctacttgaccgggggctcggcttttgccagtgttcgcccatcccctagttttctacctgcgtaatcctcttccctcactctcatatttcatatttcatctgagcgccttacttgcgaaaaagtgaagatgcagtgtggcatttctgccgacactcactttggaccccgagtgctgccatgccgtcgcgatttcgactttacgttgctcttcgagcagggcattctcgctttggctccgcatcttttattcctcactctgtgcattttcagtggtatcatttccacagagagcccaggaaagtacacgtagtgctgctggcacttggaaagtggtaggtctcccttttccttagctccgaaattaggcttgcaagctaatgtgatattgaaatatcaagcaggtcatttccactctactactagctccgaaacttgttctcctcgtttgtggtgtttaccaaactctccaagaacaaagctctcggttccgtctcaaagaaaggaactaatcgaaatatagtgagcgtactaggatcatcctatatcgcccctcaaatgcgccaaaagcaaaaggcttgggtacatgctgttcaggagagagtcaattttacttcgataatgctgaaagagctgcgccagatcaaaatgttcggtattgaatcagacgtggcattcaagacaaacggtcttcgtgagttggaactccatcaatcaaagccctaccgatcaatgattgtcggtgtcaatgttttgagtgcgttgtcgactgccatcgcccctgccctaacaatagccatgtacgccactacacagctgaacctcaggctagagacacccagtactgatgttgccttcacaaatctgtccttaatttctcttttgacaaacccggtagtactactatctgtctccttgactagattcacatccgctattggctgttttgatcggattcaagaatttttttgcaagaaaaaccgagtacatgggctctcatctgtcgatgaatacttgctgcctgagaacgtgttagggatggaacccgaatcagtgccgactcagtcacaacctcttgtctgcatgactgattgctgctttagcctgggcttagaggctccagcaatactccatggactaactttgaagatccaaaatggtttttttttggctgtgactgccccccttggctctggcaagtcatctttactcaaagatatgctgggtgaaatgcattctacggaaggaatattgactgttcgttcggtcaaacaggcgtattgccagcaagctccatggatattcaatggcacactaagaactaacactatcggagaatcaccactcgacgaaacgtggttcaaagaggtggtatatgtctgcaacctggattttgaaaccacaactctttctcttggacttgacacactgactgggagctcgggagctgaacttagtggagggcagaagcaacgagtggtaagtatatcggtaatctcattccatcttaggtactaatttgcgtgagttcaggctttggctagagcaatttatgcaagatcatctttgctgattttagacgacatatttggcgccttggacacagtgacatcaaggctaattttccagcgactcctcgatcgtgctggcttggtcaggaggctgggtatcgcaaccattcttgtgacaacagctggttagtctaacttgaacccttcaaatgcttacggcgctgaccattgcctttatttcactagtggaacacctcaaagaagccgataatttgattgttctttcaaaggacggtcgcatggaatgtcaaggacttttcgaagaactggcgaagaagaatcagtacatacagagtcttttgtgttccccaagtccggaagacagtgaagtcgaagaagagagcaaggacagtaactcccaggtgggggaaatacgagaagagaagaaagaaaccagacaaacaactcaaacaaagaccgtttccaaaatctccagggtgatggggacacctcactctacacgtttggttggtgggcatgtgggctaacgctggcattcacaattctatacgtgttttgtattgcatttccgcgtgagtatacccatcactggatatattcagagacattgttcctaaatcatatcgcagaggtcatgcttagctggtggtgtgactcagctcctccaaaaaaattatatttatcttggttcctacgtcggcatttcttccatcgccatagttgcgatgggggtttttatcgggtatgttctcagcactgcgacgctatatatgtatggagacatctcatatatcttaggttcttttttgtctggactgttcccagatcggctgttaagctgcatgaggtcttcttgggtacaataatgaggtcaggaatggggacagactccttttatattagactgaatatgttgctgacgagcttttcagatcgccttggccgagcctggctcgcatatatacaggaagtttgataaatagataagccatataattgagactcaacgttgtgatttcatcgaaattaacctgaaaaattctaaacatctccagatttagccaagacatgtctcttctcgacatgcagcttcctgttgcttttggcataactccccagagagcgaatcttcgttccccagcattcacaaattgttaaatactgactttctatcgagtaggctttttgacctgtattgcacaaggggacttgatcgctactggatcaggcttcatgtctgtcataatacccttctgcatcgttgcggtatggataattcaggctttctacttgcgtacttcacgacagatcagacttctcgatctagaagcaaaggctcctctgtatgcccacttcatagaaacgacagagggtctaactactgtgcgtgcactttgttggcagcgtcaatttgcagatcggaacaccgagctcctcgatacgtcccagaaaccattttacaccatgtattccattcagcagtggttgcaggttgttttggatctacttgttgcgggccttgccaccgttcttgtttccctagctgtttttgtgacaaagcaaagtagctctggggccgtcgttgtgaacttatttcattcaactcaactttgacattgttgattactaattggacacagcttgagacttctctaggcgcaattgcaagggtcaagcaatttgtgactgacccacagctacaacctattgccagaagagagatggcttatctcaagcgctggccttcggaaggtcgaatggaatttcgaagggtttctgcttcatatgggtaagtgtctctttcagcatcactctgttacgcaaatagaaatgaaccaaaggactaagattgctattagggggcatgattccgttccagctgtgcgggatatctcatttacactggaaggtaaggatggataagctttatgaatgaggcataagtgataagttgaatagtgggaagagttctttacttgcttgcattttctctctcgcgacgatcacgtccggcgaaatctacattgacggcattgacatctcaaccgttcccaaggaaaagcttcattctgcattggtcccaatatcccaaaatcccaaaatcccctgattcttcccggttctgttcgccaaaatatttccttgggaatatcatcaacgattgatgactcggagatgatttctgtcctggagggagtctaaatttggaatcagattcgtgacaatggtggcctgagtgcgagcattgattcaactcatctgtcaaatggacaaaaacagatcttctgcattgcccgtgctattttatcacctggtagaattatcatcatgaatgagcctacgggcgggcttgatgagcacaccgagagattagccacagagcttcttcgtgaacggctgataggacgcactatcatttcaattgctcatcaaatcaatactgtgatggactcggacttggtgatggtaatagatcaaggtacagtatctgaaatgggagaaccgcaagaacttttgagtaggaaaggcatgttttggcagttgttccggggcataaaaggtgtctaaattgaagtcagccagcgagaatccgttcaaatagtcttctaagaaccacaaggagctccaccgcaggttccacaacgggccgtcccgcacaattatgtccacaccgaatcaagaaccgttggatatttttcgggctcactagacagatttctctaatccacattgacccaaatcaatcgcatcatactatacttgtgatttaggttgattggttttgatagcagctacaggattggtaggaatgtgtctctgccatgtggccctagcatcatatatatcttagcaaatcttcaatgccaccgtcttagtctgagttaaacgtggcataagaaatctgtataagcattcttttgtaggaagctctttattaggcttcaatcatgcacaggggctgtctcacctagtacggcaatgagttagcggcattaacggtcacttgcattacccactacttcacctatagtcacagtaaaaacaaaagaaaagtaaccatgcaagctcgctattacccgtagagctgacactattgagtctaggcgctaggttaaactcttgggcgaatcggctagggatacttgcacaatgtaataaaatatacgaagagggacggagagtacctgcacgtgctaaatagaggagattagttgaccattccctcccttttctttctttactttttggctatcgtgttcaagtcgtgcctagcagttctaaataaaacattaaatcaaatctcaatattgtttgcactcttatctctctctctcttgtggaagtccacaagtcagagtctatgaatatccttgccaccccacgacaggatgaacagaaaagggagatactctggtcggattggtggaaactgagggggcgggatttcgcccgagtcaacacccttgacatattcaacccctgaattatttgtcccgcacatcagttgttctcacttttactactccgtatgttgtacctatcttgatctgagagctcgccgaagcctattccaccatgtctcatatcataaactccttccagcaactagaaaaggttcgtaccttcttttgattccctgcatgggtttatgtcgttatatggtggctgtgaaatttaagaaggtaccttaaaaaggataggttgagttgaccccgctgattttggtcacagttgggtgaaggcacctatgcaacggttggtatccccgagaagagtttcagtctttctgcaagaataccattcatgataagactaggtctacaaaggtcggaacaaccagaccaatgagctggtggccctgaaagagattcatctcgatgccgatgaagggacgccgtcgactgcgatccgtgagatctccctgatgaaggagcttcaccatgagaatatcctggccctgtatgacgtggttcatactggcgaaaatctcgtgatagtgtcggaatacatggacaaggacctgaagcgctttatggacgaccgcggtggcgctcttgatctccccaccctcaagttcttcgcataccaaatgctgcgaggcatagcctactgtcacgagaatagcatcttgcaccgggatcttaagcctcaaaatctgcttattagccgggatggagatctgaagttggcagattttggtctcgcccgtgcctttaatatccccatcaacactttctcaaatgaggtggtcaccctctggtacagacctccggatgtgctcttgggaagccgctcttacgacaccagcctcgatctttggtcagcgggttgcatcatcgccgagatgtataccggtcggccgttgttttcgggaaacgcgaacaatgatcagctgctcaaaatctttcaagtgatgggcaccccgtctgaacgcacttggccgggtatcagccagttgccagaattcaagcccaattttcctatctacctgagtcaagacctgcgactcctgatccccaggatggatcctctcggggctgatctgctcgagcgcatgctgcaattgcaacctgagctacggatcagcgccgctgatgcgctacgccattcatggtttgacaatcttgtttctgagacagggctatcaacacgcaacgttcctatgattgtttagatttccaatgctgctaggtacaggagaacatggtgaacccataataaagagtgagggcattacgacgtcaggaccatcatcaaggacagggggaaaccaggcttgccctgagtgtatctacaattgaacactcgagacatgaaacgcaatcttcatacaactgaaggctgatattgatacttctcatccaatatcttcccaaagaattgtacactcttgccagccaacataatatacttcatatatctagttcctagatcataatgtcgagggccacggtgcctggctgatattctgaaggtattaattagtctcacggtcgatcttggatacttagcaagagtaatcatgtttaccaggcagcctgagaactagaatacattgcaatctaccatgagtttcagtacaacatccattggacaatatttataatattctgcatatgataggctacgaaaccaccggggtcataacgccatcataagtcactgaatcgtaatttggatataaatcattatttaaaaacgcctgccagttcaaatgcatcttgggtatcgacggaatgaggaaaggagatggccataacaacagaatgcaaatgaatgcccgcaaaatcaatgcccagggtaaatcacagataaaggtggtacatagccgtcgggctacttacaggtttattacaacctgcaacttggcaccttgagaacggctttgtctttgaagctgcctttttagactttgagatggaccgattcccagcgcattcgccacaatatacctgacaaaattgttagtctttgtcacggactcatcagctcaaaatggacaatactcacatggccacatggttttgcaatatgaatctgttgttttagcccctctccggttcccaactcgtcctggcagttcggacagataggcacgtcatcttctgccaaaaggcgagtgaatccttcgggtgctggacttagtcctttatatgatgatcgaggctggggcgccggctgaataggcggataaagaaccgcagagtgaagcaaccccaagtcactcatgccattggcacgatagccggaccatgtcccatcggatcttctcggccggcgtgtatgaggagggaagtgcattggtattggaatgccattggtgtcgaagtacctgggttctattggtctcggcctgagggtagaagacccaacaaactgaacatctccactgcccggcgagacctccgcttccagatcgattacagcaggacgatcagccatggtggacgtgtggttcatcaaatctcccggaaatcgtaatggacggggggatgtgaagggaccgaatattgatgtcacattccgatggggaggagagtctgggtcgtttgtcaagtcgatcacggcattatctccaggtgaaagcatcaccggccgtcggtagtcgaatccatctctatctcttctgggtggcaaccgggaatcagatcgagcgtggtcggagcgacgtgggtgaaagtgctgttcccaagcggcatcaccgcttccatcatcttctgtggccatctcacgatgtcttcgctgagagagaaagaaatcttgttagctaggttcttaatgatctgatcgggtgccccgcccgtttcacgacggatgaaggcttaccttggttctggcgcccataaactggacgccagagttttcactcatttcagggcctattcctgaagtcaaggaatggtattttgcagagaaaggagaaattgaaagccaccagggaggtgagagagcaagattggaatccatctttgtgtctaggccgagtcgcaaggcggtgaacttgtgccaatgttataaggcggtgtcttgattagtgagctttgaggttgagggccgggaacgcattccagaattgacaagacgaactggctctagcaacagatatttaactcatttctgtagggctttgttgctgtctactattagtattccacaccaagtttcatataaagattggaccaaatgaaaggtatgaattcacgatgaaatctttcattcatctctaaatttacctgtgaaccttggaatatcatctgtgaataccatctgtgaatatcatcgcaccaagagctttcaaatcaaacaccatggaaaattcagaaggtcgcatgctctaatattacagtattttcctggtgatcatgactgtgcctctagcactgtgatcacacccgcctcattcaacgtcacaatactctgagcagctgatccccaagcaaccgaggtagcagggaccgcactccgcagaggctctgaccaccccttggaggcctttgagtattgctggacagttactccgctgggcccaccagtcaagaggaattggccagtataatcccagaagattgagtctatctggcttcctgtgtccagtaccttggtctccttggagctgcggagatcccagattgatacagtggtggactgcgcggctaccgcagccaggtaagtaccgttctcagagaagaacagacatttcactgggcccgacatcgtatagtccgcagcagcggcgccggtcttgacatcgaagatcttgacttttccgtctgcgccaccggccgcgatcaagtgaccatctgggtggaagttgacagacagtagagctgaacaaaagtgattagcatcgcgcttggatatatgagttccataggttgacttcttacctgcatcgcagaaaatttgggagaccacggtgttggtggcgagatcataaagcacataactcttatcgacaccaacagaagcagcaatatcaccagtagcgtggactgtgacagccgtcacctcaccagagtgggaggcgaagcttgcaacttcagcgccattctcaaagaccttgacggagcccgtagaggaggcaacgacggccttgtttcctgcccatgtcgcatcggtgactgggccatctgtcttgagggtctgtacgacactcttctgggagagcgagtagacaccagccacgccgtcaacaccaccaacaagagccaggtcaccagtcgggttgatagataacgcgcggccaccggggtagagaggttccgagacctgagatggcttaaatgtggaaatagcctcacttgaggcccagccctcggggactgcgcgcttacgtcgggtctttgatagtctgtccaataattagtcgtctatccagaaatgcgatggagaagcaccgaattcacgtacgctgcctgtgtgttctcaattcgctccaacactgcttggggcaggcccgtggagtccacttgcatagcctctcctccggcgcgagtggtaccaacagaaacgttcgaaagtgcctcgcgggcctcgtccctctcctgcgtcaggcgcgcaatcacccgcaccgcggcatcatgctgatagagtgccgaacttagctcgcgccttgtctgtgccaaattctgctgcaaagtgaaggtctccagggccaaggcatcccactcttcttgaaaaacgctgagcagagacgggatggatgtaagagtagggggtcgaggtcggacaacgcgttgcgacttgagatcgatcaaatcgtcggtggtaagctcctcgccgttcacgggatctttgccatgctcggcaatgtatgcttcaataaggcgcttttcaaatacgctgcctatttaattatgagattgatgtcgtgcgcgcaaggtgatttcgaagacttaccgctcttggtagagacgacgggcacttgaggtgcttctccggagactgtgagaaaggtttagtgaggaactcgcttgaaagaagagcacaaaattgcgattcatagtaggctactcactagcacaaagcatagttaattggtattggttgatgagggttgatggacaggacttgacgcgaaacggctccttggacttttcgatgtgtcctattatggtttagcgtcttgagctgagggcggtgtagtagggcggaatattgcgaccagcagtgacgtaagtccggcgaattttgaccggcagaaaagtacagtccttcccgtgataggtacggcgtagaggggccagagaaataggcggtgaggcttaggaatgtatggtcgcggtagcccgccgtagaccagcagctatcgactttcacaattctccaattctcgcttttgcatatagagataacttatctttctatttcgattgaacaaaatggatttccctcgatgatctacagaataggcaaagggcacgagtacaaagcttcacttgaaagctagcaagcgaatacagcgagcgcattcccatcatgcctaagaacccaaagtttgaatatggtatgtcgctttgcacctctctaacatacctatttgattctaacctgttatgcagatgcaaagcagcctgcatttctgcagaagctccggggccagtatggagacggcactggtcgcttggagcggccagccttacgaccgaccagactcaaggtcaataatgacgacgacgatgacgagcctacctacctcgacgaagaaagtaacgaagtgatttccaaggaggaatacaaggcattggttggtgaaagtggtccgaaaggagaggacgaggccggcgaatcagcgaaggacaaatccactggcgatcaagacaaatcccaaacagaagtttctaccaacaaacagaacaatctcactgaggttggaggtcagaggaaacggaaaaaggccaaagtggtgggtgaggacaatgccgaggccgaagaagtccttcccaaggcaacttcgaagaaatccaagaaacccaagaagatcaagctctcgttcgacgaggaatgagagtccagcaaggctgagaactagagtattcctttgcgccacgtcgtgggtggttgactcagtgtaaagcatcgaggactcataatgagtcaatagaacggattacacaacggggattgtataccgtcataggattagagactgtcaaagtcaaagtcatatagaagaatacatactaatgccagtattcagtctataagataaaaatccatccagttcaaaataataattcaagtgctataaaaggtctgggccaagggcgcatctttatccgcaactttttttgcaacttttttttctctctcacgggatccagtcgccttccattctttttacaaacaacctgctcttggtctcagtatcagtcaagatgcctgttgtaaatgtcgaccagctggtccgcctacagcggaagcccgaggacataagaaatgtgcgtgtgcccctccatcccactcatatcagggctttatactaatctcagccaccagatctgcattttggcccacgttgtaagtcaaagaaatttacactttcgttccaaatgagcctaaaatgctcatcgcgctttcttttgcatttttaggatcatggcaagacatctttgacggatagtcttattgccacaaatggcatcatttcacccaagctggccggtaaaatccgctacctagactctcgcccagatgagcagcttcgaggtattacaatggagtcatcagctatctcactgttcttctcgatgctccgccgtccaagcccggacgcagagccagtgaccaaagagtatctgatcaatctgatcgattcacctggtcatatcgatttcagcagcgaggtctccaccgcatctcgtctttgtgacggtgcagttgtgctcgttgacgcagttgaaggtgtttgcagtcaaaccgtgacagttttgcgacagacctgggttgagcagttaaaaccgatcttagtcattaacaagatggaccgcttggtaacagagctgaagatgagcccggccgaggctttctcgcatcttagtcgactgttggaacaggttaatgctgtcatcggtagtttctaccagggcgagcgcatggaagaagatctgcagtggcgtgagcgtatggaagatcgtgtcaatgctgcagcggctcgggaccaagacaacaaaaagacatcagctgacgatgagtctgcacaaagcatcactgagggaactgaatttgaggagcgcgacgacgaggatctttatttcgcacctgagaaaaataacgtcatcttctgcagtgccgttgatggctgggctttcacaatccggcaattcgccgccatttacgagaagaaactcggaatcaaacgaacagttctggagaaagtcctttggggtgattattatttagaccctaaaactaaacgcgtcttgggtgtgaagcatctgagaggacgtgctttaaagcctatgttcgttcaattggtcttggatagcatttgggccgcttatcaagccaccacaggtggtgacaagggcaaagggtaagttgaaaacgaacccaactatcgcgtcaacgctgatatgatattgacctttactagtgacccagtgttgctggagaagattaccaaatcgctcaacattaacatcccggtatatgtcttgcgcggacgcgaccctaggaacattatgaatacactattctctcagtggctgccactatctactgccttgctggtttccgtcattgaatatctccccagtccgcccgttgcgcaagctgcccgactacctgaaatgatcaaaaagtcccctggcgctgctttcattgccgacgatatcaagaccgccatggtggaattcaagacaggacctgaacagcccgtcgtggcatacgtcagcaagatggttgccatcccggagagcgagcttctgtctaatagaaagcgtagcgaaggcgccatgactgcagacgaagctcggcaaattgcgcgtcgcaagcgggaggagattgcaaagatgcaggcggaagcccgcagtaatggagaagcagatgactttgatcgtatgacatcgatttttgaaaccacctcattgatcactgagacgactgaggagccagaagagccagtggataaggaggacactgatcatcttattggtttcgcccgacttttctccggaacgctttcggttggagatgagatctatgtcctcccgcccaagttctctccagccaatccgcacgccagcccggagccaaagaaagtcatagtcacagacctgtacctgatgatgggcagagccctcgagcccctcaaatccgtaccagccggtgtggtattcggaattggaggtcttgcaggccatgtgttgaagacaggcaccctctgcagccgacttgatggaggtatcaacttggccggtgtttcgctgagcatgccgcccattgtccgagtcgcgctagaaccggtcaacccagcagatctaagcaaactagtcaccggcttgcgcttgcttgaacagagtgatccatgtgcgcagtacgaagtgctgccgagtggtgaacacgttatcctcacagcaggtgaactgcacttggagcgttgtgtgacggatctgcgcgagcgtttcgcccgttgcgagatccagactggtgaggccatcgtcccctaccgtgaaactattgttcacggccccgagatggctgcacccaagaaccccgacctaggacgtggagccgttgtgacggtctctgcttcgaagcaaatgacccttcgtctgcgcgtggttccgatgccagatgctgtcacggaattcctgactaaacaggtcggaactatcaagcaactccaattggagaagcgctcagaagctgaaggcaagatagagaccgagaacgcagccgaagctgccgttgacggtactggcgaggcgcctgaaggcaacattctctccaagcaggagttccgcgaaggtctagagaagttgttcaacgacgaggtcaaggaagacaaggagctatggaagaacgtcgtcgaccgaattaccgctttcgggccccgcagagtcgggcccaacattctagttgatgcaactgcagtcaacacatgcgaaaaattgtgagtataggttaaaagaaacactatatctatcatttagatctaacatctccttcctagcttggtcgatgacaccaagcaacagatcgacggtgataaccaccaggcactggtcgtgcgcgatttcaacgacaagatcgcgtatgccttccagctcgcaacaggccaaggtcccttgtgccaggagcctatgcaaggcgtggccgtgttcttggaagacttatctgtgcagtctagcgcaggtgacgagcttgacatgggccggttgacaggcgagtcaatcagactggtacgtgaaggtatctcggccggtttcctggactggagtcctcgtatcatgctcgcaatgtacagttgcgagatccaagcgaccagtgagtatttcattcttcccttctgttcatgccttcacaccacacgcgccacacgcgaaaagcaaacccacagctaacacatcatcttcacccttaaagccgaagtcctaggccgcgtctacgccgtaatcacgcgccgccgaggccgcattctctccgaaataatgaaagaaggcacgccattcttcacgatcctggcgcttctacccgtagccgagtcgttcgggttcgccgaggagatccgaaagaggacgtccggtgctgcgcaaccgcaactgatcttcgcaggcttcgaggctctcgacgaggatcctttctgggttcctgctacagaggaagaacttgaagatctgggtgagcttgcggataaacagaacgttgctaagcggtatatggatgctgtgcgcaatcgcaagggtttggttgttcagggacgcaagttgattgatgcagagaagcagaagactctgaagaaataaggccggggtactatttactctggtagagtccaaaatggaagatttatttgcatttcatttggggcttttttgtaggatggacatggatgatatatggattggggatgttactccgaaaacatctgtcgagtcgcactgagtagacttggacacgacagatgaaaaattggaggttcacagaagatgagagtcctccgcgtgttcttcaaagaaaaacatcaatctccctcacttgacaaacacagtccgacatggcataggtctcgaccgtgtatactaaggagggttacccaatagggtctacgagtagtggcgttgacgcctctctacttagaaagaagaggaaggagaaaagcgacgacaggatgggagcctgcagtcgagagtcgaaggaaaggaagggcggaaatgacatagatttctcaatcatgtctccgttgggtatctttattctgaaatcgttatcaatgtcaataatacacatatctgtgagtgcacagtggcgtaattggatcgattcaaacggggaaaggggagcttttcccacttcgtgaaacatgaaagtcgtcatgatcaacccgggtgctgctgcttgagagcatggaacaagtgtgggggtttgaaaggcattcctcgcagtgaaggttgggagtgaatttttgctgaaaaccatggatcccggaggtagaaagacaatgctctcaggggatgagcagatctgccacggacatctgggtggacgggagcagattctgcttgattgttgtaagctgaaccactgtgtggccagttgacagtagaggaaagggtcatagccattggacattcaaagagaaagccaaaagccagacaaggaggggaccaagttcgaacaattacatgttcagaacggcctggcgaccttcctctgctcactagttccagtgacaggatctctcatttccttccagctgacagggaacatcatgttgccagcgtcactgcgagccatgacaacaccgagatcattgcgtgcagtagtgatgtagtaaaagctctgatcgccaagcgagataacggagccgcgaacgatatcgccgacacggaacatctcatccataacgacacggtccttctcaacagcccgtacatcctctttccggataagtgcctggaagcgcagttcgtcggtgctgctgtggttttctgggttggcagcagatgtgaggatggaggcgacattgtcattgtctgaggccgttggtgattggccttgagattgtgctgctgattcgtcgaggacgacgaggatagaaactgtagcttgtcgcttctgtacacgggtcactcgtgcaagaacgatggagtctaccgcggggagggtgttatagcgaggtttcgacgcgattgagggtacgacgacgggaccagccggggttgagcctgcttggtctttggaatatatcactcgtgaaactctgagggtcggtcttgtttgtgacttcggctgtgcagggtccgcaatcacaggaccggcgatggaggcgtagatgaaggattgctgaacgtgtgtgccgggacctgcagaatatgtggataaagggccgaggcgttgcccaggaatagcaataggtggtagagaagccatcttgcaaaactggagttgggccaattctgaggtaaaaaaggtctggagtttgcaaaggcagcgagttttctggagcttttttaggagctataatacggcccgggtttaggttattccgataccagcttatccgcatcgactacggagcacagctgtacattcaaacactatgaactacattattcaattacaacttgtcaatgaaattctgtctgcggggaattaattacagagcctatatctagcatgaaatgaataaacaatgtacgcttcggaacaacggcaccggcccagaaataccatggacatataacaacagaagagataaaagtccgtatcactccgaatgcccactgacgaagacgaataagtggctttaatatcatccaactaacggtttttgtacgttgtagggatatagtctggcagattagggaggtctacccatcataggaagcacgtttttgcgcgaaacaatcctaaccgcgaatgggatgatatgaattatgccaaataccaactagtcaagccatctaacatagactagaaggatatcactcgatgggagtggtgaagcaccactcggtggcagggtcaaccaaggaaatgtaacgagccagtgtgatatatgtgatacaagttgaacatctttggtctcatttcctttgcctttgctgattgatcatgcgctcgatttcggtggctgcggggccagatgctttagtgcggaggagttccagggtgttaaggtccttagtcttttgtgcttcttctccggccttcacaatcatgccgcacttcacccacatctcaattctctcagcggggggcaagtggctgcactttggcacgaatcccgaagcaagttttgtgtttccagcacccaaaatctcgttatagaaaggctgtcttgtgtgagcgtatattcagtagttaggattattgactgtcttacctcccatccgattggggatttcttgagtttagcgatttcctccagttcgccccagtcacgcttagccaccaaagctctcagtctcaaccaccagaaagttttttcaggcattttgaattcattttggatcttgtgtgctcttttaccgtaaccacctcggataagtctgtagactgtctcgttgacactaaggccaaggaactcgctgtggtctgccaagtctttatccaatgcgtcttgggctttcaaaagctgggaggcctcagagactagtttttggttaagtaccactgtcggttccttagaatcagacaagaggcgagatgctagctggagtttttcggttcgtcgtgtcagatctgtatctcgtaaagcttctgacaatagtacattagcgccatcaatgggtcgatcgtcttggtagaacaggtctttcagtagctcgatgtcatctcctcgtgcagcagtttcaacaagtgcggaagccattgggcgggtgttgatcattcggaagaagcttgctaaaggaagcttgctcttcagatgcagaagcacgtagttcaccaagtcatcatcaccactctcaattgccttgtcaagagcaagctcatcttcctccatattcaaaagcagaggtacttgcttgccggcccgtggctcatgattgagcaattgggtagccaggtgagatcgaccctcgtcataagcagcttgagcgataacctcaaacgagattcctggcttcccatcgagtctttggacaataagcttgcatacagcttcgtcatcaacggtcgacaccttcaccttttggcttgcccagtggacatagattttgtctgcgggaatctgtaggtattccgaaatccttattgcaagcagatattcatgtcggctgattaagcgttcgatgagtccttcgggtgtgaggcgcaggtattgttcgtatgataatggtagcccgatcttatagtctcttgatgctttgagaacgcgtagcttttcagtcatctcaacaaactcatcactgttgtacagctcgaggacggatttgccaaacgaggcagctttcagcaggcgcttctgccagtaggcgtcgaattcatggcctgctgctttaatgcaagtgtcaactgctgatggtaaactcgaccggatgcgctgaatgttctcatcagccttgggcgattttttctccagttgctctacagaatccagtagtacggaagcgggagaagacgacccaagacggaatatttcttcggtaacagctggaaattgtcaatgacagtctgcctgtctccttttgatgtcaacttacctgcgaccttatgcacgaattcgcatgtgtcattagttatgagccgaaccccatcaaactctggtatgacatgaacgcggccatcgtagtagtatctaaaatgattagaggcgttcgtatatattacacaaaagagaccacttactttgatgcgactccgttgggcccaacaagatgaatttcatcttcccatccaaggatgacagcatcctcgccacaccaattcacggtatttggaggaacccgagattttgaatcgtactcgctgaacttgttctggaagtcattgctgactacccataacctcccttctgcggtgaaaagtgcgacaaagcgccctgtgggggacacactaatgtgtttgaatggaccatcttgcagaatcttgtcttctgcttccgttgagtcgattaaaaatacggtcttgtcgacagccaacagaacctcaacggatcgtgagagtgtatgggctggtggaattaaagcccatgatgatacctcgccttcaggacaaggtgccaagagtcgcgggcgcggctcatcatatttagacacggcaattagctggttattggacagcaatgcaacaaggcctgatgaccaaaactggcaggctctcacgccatactcttcggcgccctattgaattgttagtttgtgcacagtatagctagggtaggcagtcctaagtctaacatttccgagagaaaaggatgtaaactcgccgtccaatccgaagtagcgtcgcactgttccgtcctcagagacgaccaggagctcttccttgtcagaccagcctagtccgcgaatagttgcttgttcccactgacacaatttagtatattcatcatacatcaatcataaagtgcaaacaaacgtttatacgattgattttccgcccagagcatgaataaatatcaatggtggaacgggagccctgtccatcgcgaagtctgaatgtcttactttcgtcgcgatagagcgctgattttcacgttagtctagatcttcggttctctaatagagacttaccaatagctcctccgtagggggcgcccacgacaatgtagttctctaactcgatgtcgtcctcgaagatggcgtcatacacggcgattttgcgataaaagctgtctccaactttttcccagtttgcgagtggattgggtggcatgactgtagatctgatcacagatgaggcagtgaatcctctctacctgggttgttggatgttccagctgttgatccggagaatgggtcgcgcacgctaggcccgatcgggtggtgttgtggccttgattatcaggcggagattccccaccacagtcctcaacttctcttgatacttgctccatcttcattggccaacttggtcctcttcttaacatatggattatacagatcttgctgatattgctgatattgctcaacaactatctgaccttgaagtggcccttttactatgccttgttgcccgcgaacattgcttgatcgagaccaccagccactgtattaatgaccttgccaaagaactcgccttagtatgtctatgcacccgggatattgggatggtatctgatgaaagacagattggctcaactacattcaattactcatactgcatccttgactgttcaactgcaacatctattgacgacgtctttaatgacgttctcaccccggatgcacgcgcaaactatcgcccatcgcgtcagtggttgaacaccgaatcagtatgttgatattttgaatgctttttgctatggatatcgttgtatagactaatcaaattagtcaagcaaacgttcttcctataagagccttggggattacagcaaattaactccattttcacaactcggcagtaacgttgtcaatattgtagtcgccaaaaacttcaattttgtcagcgatgatatccaaatgcacatgctgcaggtatctattctgactagcagctcaatggagccgatgctgatatttgcgatagttaatgcgatcgaaggagttggtcaccgagaacgggaccctgagtgcgcctgaggacttcctcttcattcctcttgtggcacgagatttcgatcagctccggccatctttgaaactacatctggtaagtattatttgtgcgtgtccgcattttgactgctttactttagctaatgccgcagtagaatgacaatctcttcatttctcatttccacagcccggatgttggatatacctatcttgaagagaatgactggctttcagatggacaaatgtcggcttcctctgtcattcataattcaaaaggcaagcaaacgaagagcgctacagtcagtccgttggtaagtttgatgatttagaatacgaactgaacatagaaatcgaatactgggctcatgaacttacaggtggtgggtcaacttcgagaaacaagtgcgtcggtgagcacgagcgcggaagtcgttcgatacatccaggatatcgttgtatttctgcggctcagtcgcgctgttgcaggtggtgtgtctgcgaatgcaaatattcatttttctcgatttgcacagtgagttcgaatgtttccaccaccacctattacatctagcttatcttactggttctcctctgcagacttctagctcctctgcatggtatcgattatttgactccctccatcgtggccctagccgccaggaaagtctttcgccatcgcattattgtcactcctcctggcgaagaccgcagtctacagtatgggagtaatttacgtgcggtagctgatattctcgttgatgtgacaccggattcgatactagatggagttctggcgctggagccgcctttatgagattataatgcacctgcttagccattctagattactgcattagatacccaatcaatatagattcccaacttgtgtgcctctaatcatttgctttcgggcgagtcacatcctactttttcaatttcagtatctgtgcctacagtggaaccagcaagactcaagtcagcttggcgaccatggttttatttggtccataaagaagacagcttggaccctctagttcacagataaatcgatgcttctaatgctaatttaatgctatacatgtaataatcgcgccagcaatacaccgctagatattctatattcaaactctcacctaccagtactcggcttcaacttcaagaacaagtctgggggtgtatacttcgcgtccgtccttccgtttccagattcagttcgaccgggcgttaaacatagatcaccatgaactgcaccaacgggctgttctctgaatgcctccatggccttcgaatgcctgcgccactcagacaaaacaacatcgatttcagtcttggagtcaccgacaatagcatccatcttgatgtcatttctgtcgtagccaaaggggtcttccaactgcgagcctattccttcaattccatacaatgtgaagataacaaggctaacaattgggatggcccaccatcccatctcatcgaccatagcgaacggtaaaacacagccaaacagggcgaggacttgcttttggtgaatcctaatttgagtcagtatttgaaatataaaacttaactcgacacgcattagtcatgaatcttacaggtgagccactgggatcggagtcaacttgatcgtttccatcttcccgtatgcatcagtcaaggtattcaactgagcctgcatctgactagcgccaggagcaggataccacccacgttcttcgccgcgcttgataaacccatcaatgaaaaaggtcaactggaatggaaggcctaatccctcagattcatgaccctcaagacccgcgggtaacaagttggcatattcggggttataaagggtagatggatgtatgcccaggtcctcatcgacggagttaccaaaaacccaagcagcgccccattcggcgcgtagatggtttttcacggcgtacgggatagccatgagaatgcggatagtacgctcgatatcctcgcgctctgcggcggtgggcggtccccgctttgaattgtagctatttgttgcgatcgtgcggacgagattgcgcacgcatgtattaagtgtgttcattccgttccgtccgtcccagaatcgattgtaggatgtttggttgcggaagacaagcatcagacctacgacaatagataaagatgggatctgtttttgatatgtttagttgctgtctcgtcttattggttgggggtacatacgatagtgctaggtagaccaacagtgtcgaatacgaaggtatccaagtaaacaatcaaggctgtgaacaaagcatgcagaaggaccgggactagtatggcgccatgaattgcacctttgataaagcgaaaaacaagtggccatctgctcgatattagctcatgcggataattggcatataccgattagatagctcaccttcttggctttgtccgtgatgacagctgatggggatgagtgccacgccgttcatgatgaccttgtattgtagtgttttggcggctcaaggtcggagtgggcggctcgctgaaatttaacctcatgtttagatttcgaccgatacagatcaatttgttgaggctgactcctatccttaaatcccgggggatggtggaattcggctttggtatccaaccaagccctgaaatccgggggatattgaacttgggactaggatggccgtcaacattccaaggttgaaagcgggccgaacccacttgccatttctagcgccgtcaatcacgtgacggcatatatagttccatacaacactagtatgtagttggctatgttcattgtagaaatcctaatttattcaacctctcttgtgacaaggcaaatacaattgtcgggaaagagtccatttgactgaagtggaaagaaattattatgaattaatgtagatgtagaacgatggaggactggtgaacaaaccaataccagaagctaacaggactcagacaaaaagataacatgaaacaaaacacctctccaagtatgtatcctgctatatgttacatgatcacgacaaatgggttgctaactaagtgcacaaaaccgggaagcgaaatgactgtacaggaagtggcccttctggtcgacaattagctgttgactgagagagaggacgagagattgaccaggtggcaaagatccgacctgccgtgggcagtgagggtgcctcagcaaaaggtcaactgagaaatgaaggaggaccttgattcaaagatgccaagtagactcaaccgagaacaaaaacccaaaggatagaccaatggaaattgcagaaacaacacattgcgaatgatggacgtgctgatcccttaagtagagatgtagcagcaaaggccctcaagtaacgtatactttttggtgtggtatggttccagtatacaagatagtgtgccggatgcgtggtcatcgatctagggcacccgtggactttcagctgcgggcgacatggaattgtcgtattgatcacaccatcatggtgctaggttgctggctgccatggcctgtcagcaaccagatgagattgtcccccttgttatagaccaaggtcgggaagtaaagaagggcccagaagattaaggttatgacggtcgaaacgaaggcattgacgacgagtttctcattggatgtcaacacataaaggccgaaggtcacttcgtagcggtagtacgcgagttgcacgcgatcagaagctcgttgaaaaatgttgcatcgtggtttgcgccaaggcgcgcttgatttcatgttggaggaatatttatcgaggcattcattcatggccgctgggacttgcgacattagagaggtcatggggtcggaaagggactcattttgggtcgtcatcatggccatcgtaacgttttcgccaatcgtacacaagtgatagacatcaacgttggcggtagtttggctccagaagtaggcgaaagtcgagggtgggtgtgaaagagtcgcaagagaaccacgtaggaacgctgaaaggtaaaaagtcacaattggggccggcggggtggaaatataggaagggaagggaggtcacgatccaagggggctggctacaacgggaaaaggcggaaacggagtcggcaccaggcggaaagcaaagagtagagtcattagaatatacaacatggatatattggacatagatacattgtggcaaaaactatctattctagactatcctagctagcttagctcaacttggttcctcaagagccggtacctggatcggctgtatgtggaagtatacactctcgggaacttccaaggaatactcgaggaaaagccaattagggttttccactgcgtgttttttgtgtccaaagaacggtaatcattgaatcggaagaatccggacgaacccggtgcccggtgatgaagtctagatgtgctttaaggaaagctgaagtcaagtcacttcgtacagagtaccaaaagaaaacctgtttctccagtatagaccttcaacatggcggatgtcccggatacggacggccggatgtggaaggtggtcctcgaaaagcggtatcctgtggagctggcaaacattcttcacctcacgacggagtatgtatcctcgtcaaatggatatcctgtgggttcgagaccatcagagagcacgtttttaattggttgactatttggctactggcatttaattcgacaagcagaaaactagaaaatttttatagtttcacagggctagccctgcccgagtgtaaggctacttactgatccttacgtcaagccctgtcagaattcttgctgatctatgaaagtagtaagaaagccaagaagggctaagagtggcaaaattaggaggcgccaacctataaagcctaacccaacctactagtcagttttaggtccagagtctaaactccctaatcattggtctgtcaaacctactaaatcgcaaaatatatggtatgacaactatgtatatgatttaattctaggtattcatacaaaatatagggtataaatcatgaaccaatgaaagtgcagctgtatgagggcgaatctgacgtcttcacctgatatataaccttggaaccccgagttctgacagacaaaccctttcaaatttcaaatcaaacatacagttggtatcgtaatgcaaatcctagtaatcacctgcccaagcggcaaacaatgctctcatctcatccctctcttatacaatgaatccaaattcaaactccgtctagcagcccacacccccgaatccgcctcccgtctccaaaccacctaccccgaagccgaagtacaaatctgcgacaccacctgcctggccgaatgccgcaagcttctcagcaatgcaacctcggtctaccacgtgggcccatcgctccactcccgggaaatggaaatcgggatcaacatgatcgacgccgctgtcgccgagagtcaaaagcccgacactagcttcaagcactttgtctattccagcgtgctcggcacccagcaccgaaacctcatccaacacgaccacaagagccgcgtcgaagaaagactgctactcagtcctctgaacttcacaattctccagccgaccaatttcatggacgcgtacccggccgctgatctcgcgaagatagagagcccgtctatcaagtatgcctggaacatctttaacccgcatgtggccaatagtctagttgcgctcagggatctggctgaagccggggcccgggttttgaacgagcgggaagtacactatttcgctcagtatccgctctgctcgacgttcccggtgtctgatgtggattttgttgatgtcattggggactatattggtaagaagatagaggttccaactccgactcttgaagagggcgctagcaaggtgctcaggcttttatatgccggggaaagcggcgtgtatagtggggatcatgtagtctcggatctgagatggccggccgcaaagggagatttacgtcctgatattacaagggacgaggctgagaggctggttttgttttataatcggcgtggattgaaggggaatcccagggttttgaggtggttgattgggagggagcctacgactgttgctgagtgggtgaagattcaattggcagggtagttttatctcagctagctgaactatcataggcaaatgcttcattgagatgatcatatactgtaagatgaactttcttgtttcaattgagaaaaaaacaggtatcggaactcccgtttctagtcgggatgccgatgtgccgatgaaaattttactcaagctgtctaaatccccgaaatccccggcatttccgaccgatgagagaaagaaacaaaatcagtgctgttatagttactccgtgaagcttccacttattaatttatgaattttgccgccatagccaaagccatcgagggaaagaggggcaaggtcagatgagcatctgacatcggacaaattgattactgcatttattctgcttaacgagaggattcctatggagcctccctcaatctctgcgggctttccagcacatatttcgtcatgcttccgatgtgccacagaatttgtgggcgagctttatctaacttacagagagtacgtcatggttctcggtttgtcctgtggctctgagacatgtggggtgccaagaaccggctagaacgacttcgaagtgtattccgtatcgcaggacctagcttgacagttaacgctggagattgatttatctgcccagatatctcctgatagcctggctagctctagaccctttcgagtatggttccgcttgtatcccacgaggtgatccgctaaaggtagagatctcgacctaataatgtagcgaggcaggaaaagcgatacgatcgagtagacaagtcaatgcgaacgtgttattaccgagtcataattaaaaacaatccgaaggttaacgaaagaatgttcctggttcatcagatgtgccgggattcaaaacaacagtccagatcttgaatgggtatcagtggattttggggcaggggatgaaggtaggagaaaacagaacgctgggccgccgcgatgaatcaaattagatggaagaggtaagcactatggaacgatgcaaacggtgtatatggagtgtgcacccggagaagccaacgcagacatgcttccttgcagtggtgatatcgcagaatgctcagatgatacccacagaagggtagatgccaaaaagaaggagaaatatgtattaaaaatgcccaaagccccccttttccagttattaggtctacccgaagcgacgcattccagctcggccatcaaaggccaaaggccccgagtcatttcgtggagtcatcgggttgtcgtcagatgttggcgtgtcggatcggacttgtgattggcgacgcgctggcacactgagtggttgagtcggttgccacccggggatgttgatagtggcgctgcgggcgaggtcatcgccatcggtgctggagttagggcctggcgagactgagcttcgactatcgtggtcatcctgtagatgcaggttctcaacatcgttggtcaggttttcttcagcaggatctcctagctgatcagatggtccttccgtattcgcctcggcgcttgaatgcgcctgcgtttcatgctgctcgccagaatcattggctgccctatatgctgccagttcctcctcttgtctgtcctccaactcattcgagtcatcgacctcggcgctgagatcggtgaatgcacggcagttggggcattggaacattgggtaatcgggggagtgaagcagacggctgatacatttgtaatgccagacgtgcgcgcaggctgccatgaacaaacactgatagggccgctttattatagttagtagatgtaggattggtcagggaaaatagaaaaaaacgaaccaagacagagccaaggcaaatcgagcattcacgacatcccgaataatcagcagtctcgcccttgcccaagtttttgataaggctttctgtgtttttgctggaattcttgttagcgtcacacgacactcgggacaataggtaagatcgcacttgaactcgttgggctgctgctgccacgatcgattacattcaatccgaatgcgaacgcatcggaaaatcatttcttctcctcctcggaagtcgatacccaactgcacgatatcgccatctttgatggagtacagacgggacaccatattcggctggctcaagcgcatgtggttcaaaaatgtaccggaagaactgccaacatccttgatgtgccactgtccattcacatacaagaactcgcagtgtttccggctaacgaccttcgacttgaaccccacgggagcatctgaaggctcggtcgggttggaggacggtacaccatcacgctccgagtatcgtccgacacgaataacacagctctctgatggtagggtccgggagactgggacgaaaggtaaagagggtctcgagctctggagggaatcttgataggggaagaaccgaatgatcgctttggtctccatttttgaaggaatcacctcctcctctgccggagcgctggtaggtgcgaccgcattgctttgagcaacggcgggttctgccggttcgaccggctctgggggcgggttggactcctgcggggtgggctcctgcgagttgtttgtagaggtctctaacgtgcgaggtggcggtcgaggggcagccgaaacgctcatcaagcgtgccataggattgggttgggtatggtcggtcgagggcgtggaattagcggactcggtggatgatagttggctattgaggtcgctagcaaacccgtaactcggcgcgggcgcagaggtgtaacgagaaagaactggatggtcactttcagggcatggggaagctgtggtggagtttgtcggagagatggagtccggattggagaaccgccaaggaattcgactgctcaaactgtgtcgagccgagcgctgcccgctaggcgaggaggtcagattatgggtgtaggttcgtaaactgaagcggcgcaggcgactggggcgagggcagtcaggtaaggaggtggaggcggtgactgaagtagacatggattcgatttggcgaccatgaaagaatatcgacagagaattaaatagtgcccagagatttctgaagggtaacgtcactgggatctgcaactgggctgatgctattcaatggtttaccaggacatcatatgattagggtaaagggatgaccttggaacgagaagagatttcaaagcgatggaaagatggaagaaaggagtgaaggaaaagcgaggagattagaagagcgagaaaggcagggtgggatgtttcggccttcttgattgtatatactgtcttgtctgtcgaatctttgggatctttgctctttgccatcggttattaaagccctgacagtcagcatttcttggcaggaagatatctccccgcatagttaggatatataacgagagtatttatatgaagtatatggaataagtatatggaataatcgagagcgtataatagcaggatattgataaattactaaatccgatactaacgatattcccaagtatatacttatgcatatgtcgactgtcatggctcgtccttacttcatgtaccacgcatataggatagctaagtggtctatgctttcacataggcaatgtacatctctgtaactagttatgtactctattctgtactccctatatatcctatatgtgatctataccaaagcagatatcattatgtcgaatcaactagaacaatagctgaacaccacaggttacaaccttagatcttagaagatgtggcaaataatatatattaccaatgaacctgtagggcctgggccagttatctgtttgtctgacaataccctaactattcctatctacaaagtggcattccatgtgatacctgcaagtcaatctctaaccaccaccaacatgcccttatccatatgtgactctatctggtgatcatctgcgtcacttacaaaatcacaagagcaaaggtaatgccttcattggtgtatagtgtagcacggaccttgacgggacgctagaaagtacgctttagacggcaaaagacgttgaacccgactagataatagcgatgtagtgatataagaagtatttcaacatctatagagtaagagcagtgtctagaaatatgctgtacaacttactattattaaccagtagttgactttatatgatgcagttgatctccctttccggattggtcagcctagagcttcccccggggccgatgatgtatgtgctggagctggtgcgtgtgggaatgaaaatgaaaataaaacccatggaagagatgaaagaggagaacaaaaagaaaacaagtagattgacctagtcaattcgatcaatccaacccccaatgtatcctccaacacatagaaaagccattgaattccaagtttctgccgtaggagactagttcgctccctctcccctcccttaatgaaacacttgcaacttccttccttccagcatcaggaggcttccctccttccttttttctcatcacgcggctttttctttgtgtttccctccaaagcttcggctttattcaactcccttattttcaccttcgccgactcgtctttcgcatccctcacactcactagaccgcgcccgatgcgggcttgctagccagcatgagtggaatcgcgaatgcctgtctgtcttgcttttcagcagtggaccaatggtgtcatatcacagcatgtctcggtcccatcggagctcgttctcgagatggtatctacgaaacaaccctggccgataatgagcgagaagcggtatcagatcttctaggctacttggagaacgtacgtgctcgaccgattcatcattctgaaccactatcttcccttctctgaagcatagctggagactgggttcgcctgggtaccgccctgcaccgagcataccgctgacttccaattgtacagcgcgcagagaccgacttcttccacggcgagccactacgagccttgagtacccttgtttattccgaaaacgtcgacctgcaaagaagcgccagcttgacgtttgctgagatcacagagcgaggtgcgtatcgccatcttgctagcaatgatgcaagagctgaccttccgtcttatctacagatgtgcgcgaggtcgatcgcgataccctcgaacctatcctctttctacttcaaagctcagatatcgaagttcaacgggctgctagtgcagcgctgggcaatctcgccgtaaattgttggtcacgtccccgtcccgtcacccatcacccatctcctttcccgcttcccacacggtcgctaactcggtgcagctgagaacaaggtcttgatcgtcaccctcgggggcctatctcccttgattcgccagatgatgtcgcccaatgtcgaggtacagtgcaatgcggtcggatgtataaccaatctcgcgacccatgaggagaacaaggccaagattgctcgctctggcgctctaggtcctctcattcgcctggccaagtcgaaggatatgcgtgtccagcgaaacgcgacgggcgcactgcttaacatgactcattcgggtaagtggctctagttgattcgtctggccgtttctctaacatgaagaccagatgacaaccgacagcaacttgtcaatgccggcgctattcccgtgctcgtgcacctcctctcatcccccgacgttgacgtacagtactactgcacaacagctctcagcaatatcgccgttgactcgacgaatcgcaaacgactcgcccaaaccgagtcacgcctcgtgcaatcattagttcaccttatggattcatccactccgaaagtccaatgtcaagcggcgctcgccctgcgcaatctcgcctctgatgagaaataccagcttgaaatagttcgggcgaagggcctttctccactgctacgactcctacaatcctcctaccttcctctcatcttatccgccgtcgcttgtatccgcaacatttctattcatcctcttaacgaatcccccattatcgaagcgggcttcttgaagccgttggtggatctcctaggctcgactgacaacgaagagattcaatgtcacgctatatccacgcttcgtaaccttgctgctagctctgatcgcaacaaagaacttgtcctgcaggccggagcagtacaaaagtgcaaggacttggtcttgcgtgttcccctaacagtccaatctgagatgactgctgcaatcgctgtgctggccctcagcgaggagctgaagccgcatcttctcaacctcggagtgtttgacgtcttgattcctctgacaaactctgaaagtattgaggtgcaaggcaacagcgcggctgcgttgggcaatctgtcttcgaaaggtatttccccttatatttgtgtgtccttataagctgctaacaaattcgtagtcggcgattattcgatgttcgttcgcgactgggcagacgccaatggtggcatccatggctacctccatcgcttccttgccagtggagatcccacattccagcacattgccatctggaccctcctccaactgctcgagtccgaagacaagaagctcattggatacatttcacgatccgaagacatcgtgaacctggtcaaggttatctccgacaagaacatcgattcggatgaagaagatatagatgatggtgagggtgaagtcattacgctcgcccgtcgctgccttgagctggttggagctggtcctaagcagacccttgtagaagcctgaaccttctgtttcgtctggttataccacccttgttctcacccttgttctattttttttcggtcccttctgctgacgatgcttcctcgcaaacaaggtcttgtgtcctttgactgaatcgggattttcttttcttctctcattctgtcgctgaaagcgattattttcagaacttatatagcgagtaatcgatttttatgataacttaaggggacatagaaataaaggcgtttcgtcaacttgacaaccttagatggataagaagtatgataagctaggtatttgcactttcccctgctcttgtcgcaccaatctcaaccgtgagcaagctgggacgacatcgagacttgcacaagctggtacgttcttcagatctcacgcggtgacctcgctgtactaaccatccgtctttttacagaaatattctgcatcatgggcaagcaggtaaaatggattgtcgactactcgccagtgatccttgcatccaatgcctaagttggatcagacccagctaacacttcaccaactgtctccgtgaggggatgtttgtttcatattgcaactatggcgttaccccagggatcggtatacaacacactaccactcacaatgggtcgaggactattgacacaagtgggctgttcaggtgatctcgtcggtttcatcaacagtcgtagaatcgtcagttgtgagattggagtcttcaatggtttcaatttggaagacattctttgcgacagcaatcttgggaggtgcagaatcttcggccatcacatcatcatcctcgtcatcctcgtcgtcgtcgtcatcttgttgaagagcgttgaacgccatggttttgcggttggtgtcgtcccaatcagcctaattaaacgtgagcacctgtacatcacgaaacaaccatctgttttcatactcttcgggagttgacggtcttgccacgagccatgcttttggccttcttgatttccaattgatccatcacggcctcggctcggtccattcccttttgttgccttaatcgctgggcccgtgaaaccttgtcattttttttctgctttttctggatcccggaagtcgcacggtcagccagaaccgaaggccttgttgtgttaggagattccgctcgtggaagcgaagtcaacgacttgtcaaggtcgagacttggggatgctgctctccgtgctgcgcgggaacgctgggactggcctgtttcgaatattagatacccaaacgtcaatgtatgcggcattcgtattcaacttacttttgctcttcgccatggttgctgttttgaaaaattatcaatctcgtgggatgagatcgctatcgataaaaaaaagtttacggcagacgaagacgaccaaaggcgcaccttttctacgcaaacatgtaatttgatgtccctttctacacgcgtcttgacactcccacgttctctgtcaatccatgctactgctcatgctggcagataccttttgtcacagatatacgtctggctttattgacaatgaacacccgcgacgtgcgctctgagatcttttccaaccgccccgatcagtacgcaagtcgcaacagtcattatgaaaccgccctgacgactttacaaaacaataaagcattagcatacatatttattgctcttatttcaatctgtgtctttctcggttacctcggacttgttcctatatcgctattccagctcccctgggatctcattgtctattttacaccctctcgaatcgttgtcgctttagaccctcaaatatcgacctccaaccccaacccgctagcctcggctttgtccttccagaataaaagtgacgcgatgagacgtattcttggcttagacaacaacgtctacttccctttcttctcccggtcaaaatcgctctctattttcggaaatgcgctgctaggaaacactcaggatgccacacctccggggctcggaaattggaacaactcgtgtttccagaacagcatcatacagggattggcttctttgaaatatctcgccgagtttctgggacacaacgtggacaacctctcggacaaggcttccgtctcgacgcacagggcactattagacctcatcgaccgtctgaatagcgcctccaaaagtggaaccaagctgtggatctccgggcctctcaagtccatgagtagctggcaacagcaagatgcgcaagagtatttttccaagttgcttaatcaaattgaccttgaagctgagcggtgttcacgcggagagactttgaatatgggattgaagatcgcgggaccggatgagaacatatttcgagacagcgactctaatgacccggtggtgtctgaggggtccgaatcgctctcatcgacagataagatttatcttgatagggtttcatcttgcaatcctctcgaaggcctactcgctcaacgagttggctgcatggattgcggatggactgaggggctctcgttgatacctttcaattgcctcactgttcctctgggcaagagattctcgtacgatgttcgcgaatgtttggatcaatacatggcgcttgagcctattgaaggcgtggaatgcgccaagtgcacgttgttgcgtcgactggagcagcttatcaacttgatcagtgggattgaagccgatgagagtcggtcagacagctccgacgaacctccacgatttaatgctgtgaaggagtcggcctactcgcggttagaggctgtcaaggaagctttgcacaacaatgatttcagcgaaaacacattagcgaacaagtgccatattaactcaaagaaccgagtctcaaccactaaatctcgacaagccgtcattgcacgggctccccgctgtcttgctatccatatcaaccgcagtgttttcgacgagtacactggcacgttggagaagaatctcgcggcagtcacgtttcctcagatgattgacttgaacaattggtgtcttggcacccaacctcccaacaagcacggcaacaattatgagcgttgggatacaaacccctctcggtccatgcttccccaacctggtgaatcaattcaagtccctagcagacaatatcaactacgcgcaattatcacccattacggccgacatgagaatggacactatatctgctatcgcaagtatccgacatcagaatttacagccccggcaccggacgaaattcttcaagctgagggtgacaaggacaagcccgagcgttggtggcgcctcagcgacgatgacgttcagatggttagtgaaggtcatgtgatgagccaagggggtgcattcatgctgttctacgaagctatggatgattcctcgccgcgttcgactcgagctgcaacaccagaacatgacctagacagttatacagagtctacccagttcggaagtgaagaatcaatgccaaagaacagctccacaccatctactgtcaccgactgcgaatctgcctcatcccgtgagaccagtatctcgttgccgatggacgacttgattcctgccgacgtgcctgtgaagatctcgaacgtgattgacactaatgctcaggcgaacgatgaactggactctccctctaccattactgcatgatcaccttttcttcatacgttttccctactttttgcccgcatagccgtaccggctactgcatcatgatacccgataccacgttccatttgaggcgctgatttgaactccattgtgtttgggagtatgtgtaaatttatgtactattatgaggaatctgaacagaatgacttattgaagcaacacacttgaattcgattcagcctgactgtaattccgtagactcatccacgactcatccacgactcattcattgtggattgcctccgtctcttaaaaacccagtcaacactcggtgatgcagccttggggttcatatccccgcatttagcacgagcaccttgtgaaaggcgacccggtatgatggcccggcatcacctcattaagtaccttggggccaccacagcataaaactacatgaagactcctttcctcgccaaattagatttgcaacttacttttctacattctcgacgagttctaccagcaaagtactaattctgacgtaaaccgaatctgcctcttcccatatcgacgctggaaatcgttgaagctgtactcgagtctgtatagatcccgtcggagatctccccgggtcctcatttcctatctgatcgtcataggtatgatatcgtctccaatatttgataaagctggtcgttcctattctaattgaacagaagtattctataacatcttcaataatgtctatcaccaaatcctcacagccgcatgacatattcctcgtcaacgagctactcgagaacattcttctacatacagatatgagaactctattaacatctgctcaacgcgtatctcgcgtctggaaccttatgatcaaaacatcagtccgactccaagagtccctcttcttcaaaccctctagagagatcccagatccctcacagcgcctccgcaatccgctcctagaagatatcctctgggcccaattcttcctcaagcaacaacaaacctcagagtcgaaaatcaccgaagtaagcaggtttccgctgcgggaacccgagcgtcgcaagctcaatatctacctgcgcaaagacgccagttggaaacgaatgctgcttcaacaaccaccgacatcatcaatcggagtccttgaaatcatcaaaagatcagactcggaattcaccaaattatcgaccagcccaaacgcattcctacggatgggcgatctcttgagcctcctccaaggaggtagcacgctaattccaacccgcaacaaatggataatgtggagcgggcgatcccgtatcaggatgcccttgaactttgaatgctggacacctaaatgggtatatgagccaagtaccctgcggccggtccatgaatggatcccggaaaatatagactgggatagtctccggctggaggtggcatcgatgtatttgaatgatttcgactgtggtgtggtgattgtatccgaacggagacaggtgctcttccagggtgaggatcgaattcacagggagagcaaacttgatcggcgactggagaaagtgtttggggggtgtcaggtggaggttggaaggatgcatatcaatcactcttggattcctatcaagggtgttggtgctgatcggagatgggttcttaggccatgttcggctactcctcttgttccgatgctgagtgactcggaggtttcagattcgtcttctatgtcttcggtttctttgtctgtataggggatatactcgaggctctgcacgggcgtatatcttgaccagtttgaagagatttggaatgatactctgctatagcatgctggttattgcataggaaagaaatgatacaaccgagagtcgccgaccgactgtggcctgccggggttgtttgttacaaacagcatcgctcttcaattgtatgcatcataatcacaatgaccacttcgggaatcatgatcagcctaggtgttaggataccttgtagtataggaaagacatagctgagcttagcttaagcgtcttatgccccacttccattcaagaatagtggagtgtttcatgattgctagctttgtcggcacgaaagagggcgttggagaggcagcgagatattccgaagcgaactatctggactccttcgagaccaagccacacatttcatttccggcaaatcccaacagaaggtcccgaccctcatctacaggtgcatattccaaagagccaaataggaaggaaacacaattcaccgccagtccgtctatccgacccgtgcatcggggataaccagccaggcaacgaatccatgccactttagcgcgaccagggttgtcacaatactataacgaccctgttcggatattggccagcctgtacgaccaggatgtttcttttgctgttgaaatccaccgtggcctctaagcgcagagcgtggatgtcagtacccagcgcagattgaaacgtcgatgcgcccgaagcattcatgcccggcattgcacaggaacaacggctcgacaggacaaagcgattgccagctaggccgaagtaggcaagtcgaagaattgcagcgaagacgcatcattacaatgctaatgcaggttcacggcctaccgcagtttctcggctttgcacatgtgccattgcgatgtgtcgaaacgttctcgaaaatggcaaccggaggtatatactgtataatgacggtatccgttggcggagacaacccctggatttcgtttctggtcgatgttctgttccgttttgggaatctcaaagcgtatattctactctgtattgtatacgggaaagcgaccgtggcgatcgcatcttacccggtcgcaaatatcggtcaagacagataacctctccaggctgtgagtcgatacagaataagctctgactcggagaagataaattgattggcgtcggaagagaggatggctggcttttgtatccaatcgcgatggctgctcgagcggtctcagagatagaccgtctgatcccacagccattgcaatattggcgttggtctagattggggcgactgtgctatccgtgcggatcttcatgcacgcacagggcgaggactagggaggcgttgattgatatgaaagttgatgcttaagcccccccgggacagtgccctaggacagtggacacgtcttacaccgtcaacccgccactgccatcaccacccttgtcgatcgatgcagtcgggaccgcggatggtgtcccggaaggatctgagttacttcaccgtgtagatactccgcagtgcttcctctccttcgacgatgtgctatctcacattcttccgaatccccgccagcggaatgtgggtcggatccccatggggtggatttgttttccatggttccgtgtctttagtgcccgcgtcaatggatgagttgcgtcggaattcgtgcagatctggaaatagcatcggctattaagtcggtgagggtgtcggaacggtttcattatcttagtgtctataaaagctcggctcttttccgagttgatacggagtagtgaatcagatactgaatcaggagaaatatgtacctagacaagtggattcatcctctttcttcagctattccatgcaagaaacccgaccatctgtccttgcgattttagttcaagatcttgcatgtgaactgcatgactgcatatgaggtgcagggtataagctgcagggaaacccgggaagggctggaagggactagcgtggatctgagctccgatacacttctacacggctagagctggccaaattgaatgcaaatcaagctcctttctgcatctatttcatacttgagtccagcccacaactgtgcatataaatctacctgtacggagtagagcgtgttgatccaagctcggtttcaaagcggcgtaaagactaaccgaggtaaatcaacagaccgagctgtcgtctcctcgctgaaacaggaaatttctgcccaacataccgagtattctccggaattaacgtagcttgggtttgactcaaaaggaacaccggagctctagcgtcccagtgttccggcgcggaactatctgtccccaccatgaaacccaggaggcaggtaccatgacatgcattgggtacctatcgaagccctgagtgcctgaaaagggggagatctgaacacgacgcgcaagacagatcgtggactgcgacccctgacccagcaagctctcacatacttggaactatgtctgctcgaatatgagttcacgagtggagaacggagctccgtagccggggcttcgaaagcgttgaaccgcgaggctgtagcctgtcatgtcgatctgaatttgatttcagctcggtagtcgcatccccgcttgacccctttccaagttttctctggttccccggcgggccgagacgcggaagtctcaattatggagtaagcagttggaaccttgggagagagtaggaggcgtgggggggactctagtagcgctgcagggaattagatatgtatatttgccaaagtactcttgcgatcagtatgtcgggagtatacatctgaaatgccttggagatgataagtatgagacagccgatcatgcgcccgaacgggagggtgcaaattggtcgtcgggacacccaggatcacggattgatccacttgggccggggaagagtgtaacattcttccccgtagacgcgagacttgcagcaagcaagtcattcggtgcatccgacagatcgtataggcatcaatggctgggcggcaatgggcatggcatttcggagatctcgaaaatcaggcgttgataaatgggaaatgcctttgttttaagtggcctagatatggacgatctagactcgagacctaatttcttgattttcgaaaaaagggcatccactagagcctcggtgtgactgtggggtgcgctctgatttgtgcgatattaaacggccttttctcggggctaattcgatccatggacaggacaccgacaaggttactccgtacgagaatactccatccggagtagaacggtagcatcaggcacactagcgaggaactgcctttatccgctagaggggagtcccgacgcgccggaagcccgttgatttccaatccaatccagtcccttttcatttagattccaggctaaggcttctagagggcgacatgaggcttctagactgaaaaaccgaatcctcgggcttgagacctggcccgaatgtggagacacgggggaactcccttcgacgctttaaaagatagttcgttgtccccaggtagaatattcttcaacagtatcatcggtgttgacgtgttgacgtgttggtgaccgccaatcgctaacaaaccggattcctcacgcgagtagggctgcaaattctaattcggcctgcagcttccgcgactcttttttaccctccccatgaagcggtgaatccgaggcttgatcattggagaattgccatcggaactggaaaaacaatccgattttatcagaccagatctgaaaggttgttgggcagcccttttgggaaatcctcgatctgccgcaagggggaatcgaagccagtgatatcagatatctgattgtcgaccttgtatatgtaccatacatattatcccaatctctgtgtcagactcagtcccagacaaagcgctaaaccggggatccgatctttccccgtgtgtcagaaatccgatacatctggaatcaaagaaaaaaaacaaaaacaaaaatcccgatttggatttatcttgatttatatttatttgggttgaccagttccacccgtggacccacccggcgttccttccaggtcgatcgacagccctttgtttgcggaaacctccttccgcctgattgttcggatttcttttttatttgtttattcctttttttcttcttttttctttttgactttcctatttgggatttttcttttattactttcccttttttgggaattcgattttcttgactgcaagggtgtcgggaagtctagaagtctttccccggctttgatctttttgatatctatttgtgtgccccttctcaccgatcattgataaacaactcgcctcgactcttcttccttccctcacttcgccttccaccctacacccttcacactgttgtctctctcacctactgggccctggtactgccatcccttttcaacatctactcatatccgccatcatgattcctattcagactcgtctccgtgagatgtcgctgcccaaggcggtggctcctatcgccaacaccgatccagcacatcccacctttgcctggagtggcagcgcctcttcttccatgtccagtcctttcgcccctccaccaactcccatcgactcgcttctcgatatcaacccacgcaagtcgtctttctctagtgagctgggagccgcatatgcattcccctcctggcccaaccgtccctctctgtccagcaacgactccaccgattcctgtgccagcgcctttctgtctgacgacgacctcctgtggatgccagagaactcggccgctgagcgagtcgtggacgaggccctcaaccaagacgccactaccgtctgctccgtgaccatggaacagcaactcttgcgcatgcgagccatcgccgagcaagaagaccgcgccaacttcctcgccaaggtggaagcccacgcacgagccacccaggctctccgttccgcaaagcaaagcattgtgacagagcgcgaggcatcgaagcccaagaagcgccgcgtcgcgcccgctcccaaacgccgtgctcagtcggcatccaaggtgctcggttaataagctcaccggcagaggccggtgcagcgcaggcgctctccgaaaaccgccacattatcttcacattcatgtcattgccttgccttatctttaatttcacccccgcatctctccgacggtgcagccccacacacgacggtgcctaatttcgatttattttcccagccgtggtacccgcgagatcgcctcattcgacactgcgaatcacactcgcagccacaatctccaagcacaacatgccatggtcgatcagccacatggaagcttcaccccccgggtggtattttccctgaatgcgaccatgcacgggccgacctcgggatccatgccagggcccccgcgcttacctaatatctcgctgtcggcgcttctagaaatgcctgggccaccgtcacctcctccgtcacgtccgaccctcttgtccttcacaccgctggttcctttggctctctgactcatttccacttccactttcacttttgtttttcttgtttttcctgtttttccctgttctcttttcagcgaatccgttattccccccatcccacgaggatcatgttcttgcatggagttccagcgattcaagtccttttcggcctaccaggcttgcatccatggcggtgtttctatttccttctgatttttctcggctcttcatgaatctgtctttccagcgctttgtttcagataccccgtcttgtataccccactattttcttttttttttctctcgttatcttccacgcttgatatttgaaatttcaacagcgctagttctctgatccgctatcggaatattgcgccacgtgccatatcaaatttgtcaatagccgtttagtacagagtacactaggaagcctgaactaagcacattgaccaaatcctgaaacaagcccaacaacctaaaataaaccagacccattatccaacaacactatgttgtatactcccaacgccctcgtacttttaccctagtccccgtccctgccacgttgatgtagatggagcctactgcccgaaatgcgcacaccctcgaaatagaataatccaacagcggaacgccagccttgcccgcctcgtgtcccccgcttgagtaactgcctgaccttggccaacgtagaccccgggaccctaaacggtgaggctgtaacagcttattgttgtctatgtatgacacgagggctgtcgttggaatgcaacagtgagatcgggccgcctttagtaatccacaatggggcgacatggttgacctcatcatgggactttgtgtactccgtaaatgtacatacattagtggttgataataaatagcccaccggagaatatcgtgaagttacggttggggttggggttgttgctaggctgtttttggccggagttagggtcttgcctggattgccctcgccatttttttctgttggcggggttcactagtcggctgtggttgaataaggaatgttaacccgaagttggtgttgactcttgagtagggatgctaaaatagccctggtacctatagtacatgctggattttagcgcttcactccctgtctatcacaagcatacggagtacattctatagtatagttggcgtttcaaagaaagcctcgatccccgcacgtagcgctgagctattaccgtcactcttctttgttgccaccgttggttcctctcttctgcatttacgctatttgtcgtggatgtgttgcaccaacccacaagagcaaaatatcaagtctgggcatcacatttcatgaatttagtcgggcacatgcttcaactactgtgttggttgttaccaactcgaaagaatcccggtagattgtgactgatatcacattccaatgagcggatcatacgtatgcctatcggagaagcttccgtcgagggcaatatcatctgataatgattcaacgttggattgtggtcataatccactagcattcgaaaatcaaagcgtgcgatacatgcaggtcaaggcactgtggatacccatatttgacgaagtagagagcattcttcaacgagtagtggccgcgtggtgcagtgcaggactttaacaatatatctactcaagatgatgtcagagacgttatatgtgaggtaacacttgatatcttgtccgaagttccttttacttgtctcttttttatatttttcttagaaatgagcagtatgtgactgtgccgtaaagccgaagaacatacagagcctagaggcgaatatgtatagcccagaccggatatgcagaaatccgacgagcatcattagtgtaacagcatcatcgatatcatactaagggtagctatgcaatttgtaagagcaaactgcatcgggggtgttactggaaaccatgaacggctgaattggcatataggatccatcccggtactcacagattgtcaccggtagtatcagggtgtgccagatagtcgagcctgatctatgaattagcgaggcgggagttaaagagagatttagttactttaacacaaatatacatcctagtcacaactccaaagggataacttgacactaatatttatccgcatggcagaagcaagggtgaaaccgaacttctatatggccagagctggtagtattgagcgggccaaatgtatccatgaagtcttgtaatggagaaacgatacttgctaccagagccttagtgacagctattacaatatcgactcgcattcaaaacgaccaaagtcgcggtgaatcgtcctatgtaagagcacgccattgtcgaggttgtcgattgtggtcacttggagagtggccagggttaaaggaaaacatttatatatcattgccatatgaaagaattcctagcctggaagccttgagctatcagcaccttaagctattagcctatagtctttccaagcagatagacaaatggtactataccgtagactgattgaacttgccaaaactgaatggtaggatgtgtgtgggaagtgagatatcatgggtcaggagaggaaacatgcttctatatttctttctaaggtctaaaagtgctctacaggccgtctatgatactctatttcctaaatgtagtcacaaatgaccaaaatgactatcagcccacttgattgataacctcaccaacacaccacttctcaatcgtgttcttcactgcagcctgtaggttttgcaatgttctttcagaataccaggcaaggtgaggtgtcaacaccagattcaagcccgctgcttctggacctaacaacggggaatcacctctcccagcaggttcagtggcgaaaacatctgtagccgcacctgaaatagctccgcacttgagagcttcaagcagagcttgctcgtcgacaattccacctcttgcgacgtttaccaacacggcatggggagacataatctggaactccgcagtagagattatgttgagcgtctcagcgcttcgtggcaagcacagaacaaccacagtcgactttttcaagccatcttggaacgggacccgacccggtcgaggagatacacctttacgctcagcaataatcacgttcatcccgagacccttcgccatggcctcgattcgtttgcccagcgatccgtatccaatgatacacagagtctcatcactacacagcaacggggcctttccatcaggtgcacgaacccgactgagcaaggtgccatgggtcttccactcagtatcacacgacaagcccgcaggaactgcaactgtggcgttatggagctccataaacttccgtcgagtggcaaagtaaagcccaatagcgtgttcactcacactgtcaatattacagccgggacagttgcacacaatgattcctcgtgcggacgcagctgctatatcgacgcagtctgtgccggtcgccatgatcactataaggcggaggttgggggtaaattcggggctgaggatctctgccgtcaggcgcgtggttgtcgttataatgattgtagcatctttgacgcgactgggcagatcaacgagatcggtccgtcggtggactgcgcgggaatgccgccctggtagatcgaattcgggaattgggcaatgaacagcctcaatggcgacgatgtggtgtatgatgttatttgcggtcatcattatgagaaaaaagagaagatgtggtactggctttgaagatttctaatgacttccccgccgtaaatatctccagcgcgataagagtcatatatacacttccttgcacgtgacgtgaccatttatcttggaaggcacgacagttcgccaccgcaacctgcaatcaacatacaaccactatatacaatggccgcctcacgctcagaggttagtccccttgggtttgccgaagaagactttgccgcgaagaactatgatcagttcgagcaatgcaacttacaaaatgacaatctcttccctatcgacaaattcgatatacttcgatcacgcacacccgcagcacctagggcatacaagctcatcgagccggcacttctgcttatctctcgaataattcttgatcgtccctccactctcggctttgctcgacggcgagatacaggtgcccaagacgtgttcgttgatagggaggcagagctttgcctcccagacgaagagattattgacctagttaaaaagcatatcccagatcttgaactggatcccgacatgagtgcaaacttctcatcatatggagaaacaatccttcgccctgaatcaccctcggatatggtaaggttggactacagccttttcaactattaaaatcataagctgcgatccaatctcagaaaatggcagggcttctattactcgctacatcgctaggccatcagatggcccatattttggaattccgctgtatccgtgcctgcaaactccgcactgaagatgaaccttttgaaataccacctggcattatatgccgtgaggccggcacggtctgggagctgagatcctttggtggccgaatttatccagtctgccagcctgatggtagtctgtacaacattcaaggcttatgtcttgagattgcatcttgtaattttgacgtgatgaagatgaacgacgatctcctggaggaccaggttagcgcctcaatcagaagacagacccggatgctagatgatgtgcaggttgaaacagacagcctgagcaagaagagaagggtccgtagatttcctgttcttacgaacatttgcgggggcaaaaagtcgagcccaagcttgtgatgggattgtatggtatcccctaacttgtattcttataccatcgatcaaattgttatgcacatgaagagagtggagggaccaagcctggtcattagtctagtgaatgccactttgaatcgctctattatttttcaatcatcccatccttaaagaatatatacatatcatccactgtcactatgcgttcgctctacctcgtcgcaactctgcttctaatccaacatcatagccccttgccaagcagttcttctcctatctctttaagcagcggctccttcttcacggcctcaaccttcatctttccaataaccgtatctgccacacccatagcgcgacaaatatcaattagaggaccatccatcggggcttcgtaaacaagaagcccaagagcaaacaacaacccatgcaatgattccacgctctcgttctcgcgcgaaacggcttcaagcaatgacgcggccagttcgacctgatcttcctcggacagaggatcgggctttccatccaagcgggcgttgtgattgaatgaggcaaggttgtacgcaaaagaggcggcaacaacgcggaggctcgtttgtgaatctaggagggagttggtcgcgagacggagacaggtctcgcggagtggggatgaagaagaggtgagttgttctgggtatagaggggtgctgaagagattgcaggctagttggagagccacgatgcggagattgtatggacatgaggatagatcctcttgggatagcggtgcaaggagggtgaggagggttgcgtgttgggcttcttcggcgaagtagccacttgcacgtgggtcaagcagaagaaggcgaactagatcaaccacggcaaaatgactgccactgggaagcgtcgagtacatggaggtcaatattgtggcaaatgtatgcaaatcagggaccctgatatcggcgacaggttcggtggttgagtgacgctgcttcacaaattcaataacctccacgacaccgtggccttccttgaacgcgtcaggaagtttttgaaggagcttttcgagtggtggaactttcttatacatgacgaaggttgtaatctctcgctgaagactgggaagtcgcagttggcgatggggatgggccgggtatgccatctctaacaacatacgaacgtttcccactagcttagccggggttgcgccgctccattgatcctgtttttggcccttcaaaaatgtcataaaggtaggagtcgatctcacgctgtacctcgtggcaacatcgcgagctgcgccgacgtcgactttgatgagagtacctcgctcacccacttccgctgcgagctggtcatatgttgggtaaacagccttacagggcggacaagttgacgatgtgaagaaaataacggcgcaggaatgggaagcactggacagctcactttgcagctgactcagattgctcacaatgcggactgtgcgcgctcctagatgtgccaccggctgaggtgtaggagggacagccctcgcagtagttgcttgagcacttggcccaggggcaggacctgtcccggtgccttgagtgacgcctttaagagccgcctcgatttgaggtttcatcatttgcccaaatggagtttccaggaaagtgcgaggtagattgataatgtggtccgggatacttttaccgacaaggaacattgcaaggtcttgagtgaagttattgcagttatgaagaaaaaggtcgtatgactagaactgattagctatagttccgttgctgaattgttaatgaacgaacctcgggtgtataaatggtcgccaacgagcccaggtattcttcgataacctcatttggaagctcagtagtacctagcttcacgacctccatgggctgtccatgatgtgtactccctggagtagcggtctgaataccctgaccgaagtaatactcgattccgttaaggacaatagatgtatgataaatggcatccatttgtatccctgtcaaggcaagggagtactgtacaaattagaggttgctcgctttcaataacgccttgaacataccattcgggccataccctatgttcaagattagttggtatttaccacttgtagaactggaaaacctacctttgaaaggtcgtagacatatagtgagacatccatgatgaggtgcgtgtagaatagaacctttgaagtgaaagtcgagaaaaggagcccttgaagtgcgacctggacaggctccaatccgataacgtcagcaccggcacccctggaggctgctatcaccttcgatcgtgttctataacattttctacggatgtgatgtttgatgtttgatattcttactttggcaaaatggaatgtggtgttgtaaattgacgcgctctcatttctcactaggtatatactgcctccaggggtctcgataatacgttgcgcaacttcagaatccaataaaggtatggatacactagatcaggagaggaataatgaatttgaagctttcatatgctttaaatgttttcaatattccaataatcatttatacgcataattgtgtataataaagctgttgaagctggcggcatcgcatacatcatttcccaatcgccgctctccccaccttcgtcacctccagggccagatactcattctgtccatgccaacacccttgtaaagccacaagcacaagttctgttagtgatatctacatggtaagacatccgggatatcctcaatacccaaccaaacctgactccctcgcagcctcctaaaaagcgcggagacgcagccagctcctccgcaccggcagcgccaaagcgcggacgcgcatccaagctcgccaaggagaacaacatcaccggcgaagaggaaaacgaaatcaaagaagtctttcacctattctccgacaagaacgcagacttcccagacgagaaggagggagtcattccccgcgaagatgtgcgcaaggcactggtgtaagctctgctagctctctccctccaatctacctacaatccgaccctctcttcctcaagcccctactcttcgactacagttaccaaatactaacaactttcccttcaacagcgccctcggcctccctcctacagactcaaccgaactcgcagaaatcctctccgccctcgatccaaccctaaccggatacgtgccctacagcccctttgtctcaatagcagcagccaagctgcgctcgcgcgatgatgacgccatggctgccgaggtcgacgatgcgtaccagctattcacgcgcggcacgaatggccccattacactgtcgcatctgcggcgcattgcgcgcgagttgaaggaggacagtgtgggcgatgacatactcaaggatatgattcttgaagggaatgggggtgctgggttgagtgccggtgttactttagagcagtttcatgatgtcatgactagagctggtgtgttttagaagtgggggaatttgtgtagactttttgatagatataagggttgggttcggcgtttggcatagcatattcttttagcagggagtctgaggggttgatactttgaagggatcccaaggttgttcgaaaatcgattatcatttgtaatgtcccattgtgagtgtaagtacatactttcctccaccagcttctgcgaaagacaggaaagaattaagcctgctggtactagcaaaaaaaaaaaaagagtagagaaacacagccagtggaaaaaaataatcagagcaggagcacagaaggagatatgacccgcgcatcaaccataaagaactcccaagaattgcgaaacttgtatcgtgccagagccgcgatggaggaatgaaagcaaaagtcgaaccgtttaggagatttcgtcagccatgccgatgtcctggctggcgctggcctgggggacagtgccgttgacaggagcagtgccttcggcagggggcgcatcgttggtgaagtaatcaatcatctcagcatcaagctcctcgacagtcttgggctttccgcggccggcgttgcggccacgagggcgagcagggccctttccacgacggtttgtcttctcagtaggggtcttggtttccttggccttgggggcagcggcggacttgggccgagccttctgactgtgaatgaataagcatatggatgcggacagctagaatgaacatcaacttacgcaatgcgctcagtaagaggcttggaggcagggataacaggaacgtgagaagcatcatagacaacttcgatctgttatataggtcagtcaatgttgcagtgaaggctagccagagaaaaaggatttaccttcatggggcggccatcgacgaggagtccgttgagctccttggtagccttggcagcagtgtcagccctgttaaattggatggaggcgatgccacggctagtgccattctggttgtaggtgagcatgacgcgcctaacggggccagcagacttgttgaagtattcctatagcgcaaacgaagacgattagtattttcgtcagacaatttcagtgagcgcggttctcgagtggtggcggcgcaaacgaggacggccaaaggtgagagagcatcagcgagcacacagcatcaatccatcgtctgtttcatcctggcattggaccacggagcatatagctccttaattgcaaccccatgcgataggtcgcaaatttgcttcccgcaatggaacataacacaccaacaaatatccatagtatcaagtctccacttcatccatacatccatcaagcggtccttcaacaaaagcattctttcacgtcgccgacatcatggcatagttttccaactaaaatccatttgtccatgaatgtgtcatcccaacaacgtagtgccatgtcagacacagtttaaacttctccgagtcactggaataggtaatcaccccatagcagcaaaactctttacggagagatttgagacaagagtctcgaataggtaggtttcagtctgccctctgaacctgttgaccactattccactgatgcgctcgctgatgcccgtaggatttcaaagtagaagagatgaaggaaatgagcggaattgaagagaggtcaggatgatgaattttcatcaatcatcctcggcatagtactcagataacaaggcaggtggatttccgcatgggaattgacacgagcaatgtacatcttttcaccgtactacaacacagtttgacttcttgtctcgcagagcgccagcaatgtgtatatatttgcagagacatggagaaggagcaaactgtgtgtgccgtccatcgaggaatatccatcgatgtgggaggtagagagaagtcgagagaccggtcgaaatcgtttgcgccgcgagtctcgagaaaagagatggcgatgaaagccaatatgagagcctttagatcaacataccttgacattggcctcggacacatcggaaggctgaggaggttagcgacaagctgaaacatcaatgagtaagaacttaccaatccgctgacaagaatcttgctggatccagtctgggcgacaggggccgggtgagcaggcttaggagtcgccttggtagacttcttcacacctccaacggtgggtgccttggtcgctgcgcggcgggaaccaccacggcgacgagcagtgtggcgagcggtctggcgacggctgccgacgagatcgtcaagagatttatcaaggttggcagacatggctgtgatgggatagcaaagctggcgatttgcaagttcagcaaaagttactgaatgaacgtgtcgtgaatgatatggcgacctaggattttaagtcgctttagaaagaagttgagggcacggtggggtcacgtgggttctcggaataggatgaagcaggtatgtttatggagttgaaaatgatgaatcgtgaagggaggaagggacgagagggtgaggagagggggcaggttgtagcctgattttgcactaaaccccttttggcgcggcccaatgcgaataacatcagccactttgattggacgaatgctacggagccccaatgagtatgtacttatcatctttgtcccttctttggtctgttatacgtgagatcaatatctcccaaaacaagcagaaatccattatgtgcaggtccagccttagagattagactatggaaaaacaacgcacccaactccaaaggcaagaagtcatgaagtagacgaccgataataaaaagaaagaccaacgtcctgagttcacaatatgtactagctcttgagagcttccaaccggcctcgcatctgcgcgagagtggcttcttggtcttcgaattcctcctcggcttgtggggattccggctccgagattttggccacaggtgtggtcgtgacgggctgcgcctgggcgagtttgccctgcaaaacttcctgcaggatcttctcgatctctgattctgcttccccttcctcatcttcaaagacagaagggtccatggtagcatcatcgaccatctcttcgataatacctgccctaactaattctgaagacagttggtgcatggtcgcagacaattgaggcaggcggaccagggtgttcacatccttcatgatcccagttgacttttgcagactgccctggattttgcgcgcggagaaggcttcattgacctgcattcccacactctgcagttgggctcggctggtattcaaccgtgtggtctgtttccggatgcgcaccagctcccttgcaaagactttggtgtcattgttggcttgcttggcctgggatggatttcgctgagcccgtttagaggcattgacaatgtactggcgagtctggctgtcgctggcttttagccgggctagatcgcggtcgagttgccgtgtatttgtgcgtattaaagcattgcattttctcatctaatagatcatctttcattagtgtcatatttccaggcatgagccacactaactgcctacctgggcttgcgggtcgggcccaaagaacaccgccttgagactctccatgaatgcgctcttgcgggaatggggatagaaatcgatgataaaaacaagcaggcaaattaaaggtgtgagggatgtttaacaaataagttcagtctcggggtaaggcttgatcagcgattgacgctcatgcccggtgcatcgtagagataggcggggcaaggctaattcgttgactatgctgtcgcaatttttgaaccctcaggatactgtatgataggacttttctcgaagaccaggatcgctaggtcttcggttcagtcttcagatcagtacacgctgatgcgactgtcaatattcgaacctagtagaatggtaccttgggatgctacgctcagtggtatccgaccgggagctgaagctgagtcagttctgacgtaatacaatgtcccacataattcatgcctaaggcatgcttctaccagtttctacaacatagcaatagtaggttcgtgaatgagcttctcttacacttcttctcctctctttgaccacgttttctatcttcctcactttcttcacttcttccagttatctttccattcctaattcaatatgtctcagaccctgactcccgaaggtatgtcatgactgctctactgcttccccgctctcgaacgcgggtctgcacattttgcatagaaattactatgacgttatcaatatctaagactgttttgaaacattcgctatgccaattctacaatttcatttttaagtgagatggaggcgctaacatgctttacttttcagttacatgggctcagcgttcatccgactcggaccctgagcgcaactacctttacgtgaacatcaaggctgccgaggttcccaaggctgatgctaccctcaccatcactgagaagaatgtttctttcaagggcgtctccagaaagggcgtaacatacagcgtctccctggacctctttgccgagatcgaccccgagaacagcaaagtcaaccacaccgaccgcgatgtcgagctcgttctccggaagaaggagctcaaggaagagttctggccccgccttctcgagagcaagcagaagatgcacttcttgaagaccaacttcgacaaggtatgcttgggcgttagttctatttgattatggggcatgactaattgaatgcagtgggtggatgaggatgagcaggatgaggctggcgaggatgactacgccaacaacttcggcggtttcggtggtgagggtggtggtgaccccagtgccggtgccggtggcctaggcaacatcgacttctccaagcttggcggtatgcccggcatgggtggcatgggtggtggtatgcccgacctcagcgctctggctggtggtatgggcggtatgcctggtatgggcggcttgtccggtggtgagggtgccgaggaagatgatgtaagactgctcgcctataagtgatctgtgattgtctactaacgcaactctacaggatgatctccccgagctcgaagaggccgaaggccagaagtccaccaagatccaggaggtttcttaaacgtgaaatgtctactttctgcgaaatctatgacgatcagaaacgaaaaatgagagtgcgttaagacgcctacgggatgatagtttgaattatggatttgcttgggttttcgccgtctattgactgcagggctattctgaccaagcagctttgatccaaggccaacctttatacatggtagatctatctcattgaaaacatcccaatgattgatgaagcgtgatgagtggtcattacaagttttcacgtaagttatataatcgagtaattttacgcccacggtacaattgtatattgtaatgatcaacaggttgttaggcagtatagttttggtggatgttagtcttcaaacgatagcgacgaaatattcacatatgaaatgggctctgtttaggcattctccaggatattttacactacaatcgatgcatttacttatgtacatcatagcttgtttcatctcttctttagggttctgtgggagacgaaagtcatatatacggcaatagagaagttcaagccgaaaaattctccagatagaaattgcttcaatgtacccttctttccctgccgtactgatattcgcatacacgagggctatattgtgggtgtcgagggcaaatcggagtgggtatatgacgcatgtcgttgtgaagaacattctcaagactcaacaccgtacatcccaataatagaatagtgagaagatagtgaatctctagtaaaaacactctatataagtgtcttcatagataatcccagcccgcttttatatttcgagtcgcaccgtagacacgcggagtaaaaggcccgcaccatcattggttaaccaaaaattaccgtcacactctcacacccctcgttttcgagaacatttcactctgcaacaaccctggcatttctgcccgccactcgatatcttttctttcagaatctccctgtcattctttcgggtttcatcagcgtcttttctttgccaccttgtcacccattaaggcgcaccctggacaggcgcattttcacatttttactctcccccaaacccgcgacgtcacgtccgcccaatcgccgccatgcctcccaagaaagtcgatcagcctaagaagaagaaggccaccgttgaggataagtcctttggcatgaagaatgtgcgtcatacccttgattgaagtcgaagagcgggttcgctcgtgatataccaacatgtcctaacattgaatgcagaaaaaaggtggtgccgccaagaaacagatccaacagttgcaagcacaagccgcaagcaacaaaaacttagacgaaaagaagaaggccgccgaaaaagagaggcgtgaggccgagaaggccgccgaggagcgggccaagagagagaaccttgagctgttcaagcccgttcaggtccagaaggttgccttcggtgttgacccgaagactgttctctgtatcttcttcaagcagggtcactgcgagaagggccgaaagtgcaaattctcacacgaccccaatgtcgagcgcaaggcagccaagaaggatttgtacaccgacacccgtgacgagaaggccgacgaggaagagaagaagcaaaaggatactatggacgactgggacgaggagaagctacgtagtgtcgttatgagcaaacatggcaacccgcgcacaaccaccgacaaggtgtgcaaattcttcatcgaagcagtggaaaaccagaagtacggttggttctggacttgcccgaacggaggaaacaagtgcatgtacaagcacagcttgccaccagggtatgttttttctccacttatgtgtgcctcctacacaatactaacagcgtgagtagattcattctgaagaccagagagcagagagccgccgagaaggccctcagggacaaatcgcctttgcacactctcaccctagaggactggctggattccgagcgtcacaagctgacgggcacgctgacacccgtcaaccaggagaccttcgccaagtggaagaaggagcgtatggacaagaagctcgccgaggcacaagcacagcaggccaaggaggctactggtcgtacgctcttcgagagtggcaactgggccgacgaggatagtgagcccgaagagggcgaggacgaggatggaacctggaatttgtcagtcatgcgacgagagaccgagaggctgcgtgaacagaaggaagaggaacgtcttcttaagctcagtggcggggttctacctacaagtatacccacaactatacccgaagatgtcacacctgaagccgtgggttgagtccctccacatcctcacgatactagattcgtgggctcttgaggatccttctcccccggccacatgcaaccgtagagtttgtttcgtgttgccatggggtcggatctcgatgtcgagtgatcgctacaatcgcttgcccaaactgctggctttgtatgcaacctcggtcatcactaagggctcggctagtcgcctgttccttccaacctctatacgtatgtactacaaatgtcatgcgtagaggaaaaggtctaggctggctagccacgggggcacagaggcttgatgggtcttgtgtcccatgtgacggaagaatcaacggccgatatacctttgatagcacattgttattttgttggtagaaaaaagttcgtccattcaaatgaacatgatgccttttatttttctatgtatcagattgcacagcatggtaagatctaatgatccaagagatatgtacaacatgctctctataaacaacgcatgcgctcgttaaatgtcagcaaatagttttacagcgaggcttttgcctgcagtagcctcttctcgagcatcacggctacaatgtcctccgcaataccacgggacagctcaaacccgcgaccaccagcaccatacccatgaacgacatatcgatcatcagcgagcttctctgcctcgatgcgcagaccgccctcacgagccggccgccgaccgacaatatcgcgaatcacatcaaactggccgccgctctcaggtgtgaaagggaaccacttgcttgcgttgtcgaggagtcggtgtctggtttccagtgatgggttcgggtcccagttattcggctccttcgtgcctccgatgatggttccgccttcgagaggacgcgggatacagaaggaccacgagccatccgtattctgtcgagtaatggtcttagagacagggttacggacaagacaggtttgacctagagaacatgtcaatccacggattcagaacgtacacgttcaagcgcattccagacacaaccaacaccatcaccatcaccccatagacacatacctctgataataaacgacttcgggtcctcaaacccagttcccgagcagttcaccacggtcttcacatttcccgccatactaaacgcttccttcaaattggcgagcgtataccgcctcgtctcaccccccttaagaatgaacttgcgcaacaaatgcgcacagtagacaggcgagttgatcacatacgtcccatacttcacaccccacaccactccagccggcacctcttctttccctagaagttggaacttatccaggtgcgaatagacattgcgcacactcagctgatccagatactcgggtggcggcgcctcgaggtgctcaacgccgtcgaggaactggatgcctgcgccgggctcatcggccgcagttcgcttaagccactcatacgtgcgctgcgcttggttcgcttccttgagggcctgtggcgaggagccaggcaccgggcggtaatgggctcctgcccatggcgaggcgtagttgacggaagtttccgatgggaagtcccgggctacgagaaggatggattgcgccggagtgagatattgttggatgcatagtgcggtggaaaggccaattacgcccgctctggttgagtttgtcagctgattgttgtgtcttgtgatcttttttcctttttcgctttcggagcggattggctcgagggtattatatgtgcactgacccgatcactacaattgtgtccttggacatgttggatgttggaaacctgtcaccagggattaacagccactttataggcacaattatagacgtgaagccccaatgttggtctgggaatgagtcaagaaagggtccggggaaggcgataagacccccgcggtcatatgataaagacacatggcatgttccacttggaatgcaacatgagtatacaacatggttggattcttattagtgatgaagacctctctgtatatccctagagttggcgacgttggatagttatactctcttaatccaacagtaggtgcacctatttttctacttggcccacattctatgtacggggtatgtacggagtatactccgtagtaaggcttcttttgtgactcgtattattgcaaggatcggatttgatccagtacaccccgtacgacatggaaattctttctttcattgcccaagctcgattgaaaactctaccggtgtgcccccgataccctgatacatactatcacagggcccaagctctaggatgttcgacggtgcctttttgtgcagggatgactgcatatctctgcatttctgtcacatcacaggaaccaagcagaaccactctggagtactccacactctatacataagcctcgtggaaaagggaaaaagataagacctcggaaacactatccccaacatgaaacttctgaacaatctattctccgaattccagacaagacgagggctgctatagggcggtatagccaggttagcccaatccctacttgattgcagaccgtcgtggaatggctggatgagtgcaggcattggctgaggggtggtcgtgtaggcgccgagggatcagcagtgatggacggtgattggccgagggaggtgacgaagctgcagctcgagaacaattgcaattccaatcacatctctgtctcggatcacattattattattattttctttctcttttacgtctcgctaagtttctattctttgaaaattgggcggttccttgcagttgggaaaagatcaagttggtcaagtcggtattagggttatctatacttcaactatataaaagtactagtagacggttggattacctccgagtgatcgacgtgcaggacactaaacatagtgcaagggccagggattctctttcttcaagacgcccgtgattcgggaacttgtctgcattgatctaagcagggttaactttttttctttgctcggcttctgcatgctcgttggtgcaagtcccgcaggacaacccagccaccaagaaggctcgatctcactgtctccgctaataatgtgttggatatggtgcctttaatgtcgggtcctgctccggtccctctgtaactgcagaaacgggacagatgtatggtccagttaggaaatgaaagcgcccagcaattcccccgagcgccaaccattacttagtagtccccgtattttcattttgatcgactatcgatgctcccctcttttttgggattgttctatttaccctacgggcagcccgcttatatgtccttagtctattatatagaaccaggcttgcatcctgtcacaaacttaagccccccccgtcacgctatgtgatgagaacgtgcaagcgagtcgattcaattttctagtgcttcaagtgtcacacttgaatatccattttctcttttttattctttcccctcccctgttgcaacggcttgcgtcctttttcttcccctcgccttctcgcatatttcttacatatcctgcgtctcgcccttctcatttatagggccctttcgagcctatttcatttcagtcacattctattccttgtcaggcgctaattctaccccgaacccaaatgcgccgtgagatatcctgaaaatccccttctttcaccttgaccggtactcagggtcgtggccgattagaaacctacctggcttaaacagagaggttagtggcccaatctcgtttagactcattcatcttccctcttgttctggtatatatcatttgggacttttgtcttgaacaagtccccttctagtaaatcaatttccccgcaaattgtctcatatgcatccaatataatggttgagttgacatggaataggagcttgggggcagaatcacgaccttcaaggacagtcaaagcaatggcacctgcaccgccagctgtcaagcctcgcttcgtcgcctgcacctcaacggcgtccttattcctctatgcccagggttcaacaatcctatgtttgcatcatgatacattggcaatcgagcgacgttttcagagccaccaggagaacatcgagtttatatcggtggataatgtcagcgagcgaggtgctggaagattggtcgtcagttacgatgtagggcagacggcgattgtctgggatatcttcaccggaacggagattgcacgctttgcttccttcgatcatctgcaaatggcatcgtggatgcgtaatggcaatcttgcattcggtgagcatcatcatttatatgttatatggactccgagttgctgattaaatagcaggaaatagcaagggcgaggtgatcctcttcgaacctcctacttcagagcacatctctgcgcgcaccattttcgacccaatcacagcccttgcgcccgccatggattgtcgtacttatgcaattgggtatgtcagatgaatatgatcgagagtaacacttagctaataagtttcagatatcagaatggttctatattgatcgcgactttacttcctcaatttaccgttgttcacacgctgactactgcgcgtgaaccatcaccaattatttccttggcttggcatgcatcttcatcgaaacagaagtcagatatgctggcaacgcagtcgtcgaatggcgatctacgagtttggagtgtggcaaaaccaccagggaaagaggcacctcgggtgattagggttttgaaacgatctgattcaaactcttctgatcccaaatggatgggctggtcaaagaacggaagacttgtgcaatatctggaagggtatgcaaggccctaagaaaatgattgagattgtactgacatgtgattatagagaaacatggtcttgggatgttcgaacaaaacatgttacctacgatccaattcctacaatcgatggtgtgcgaggcatcgcaaactatggtcctactgcgactctattcaccatcggcccccagcactccgtccagcagtatgatttggaaaatccggcaatggttgcaaatgtgcaacatcttccagtcattccccggccaggcacagcggaaggcagtcgatcacaaacgatgtccccacggcgcttgcaagacgctcctgatatccgagagccatcaggtgcggctaggcgaacgccatttgatgcaaacagcattgagagcctaagacagagggctgatctgactagccctgcttcatctcgcagtcggacggaatcggtgagctcaaaggcatcctctgggaagtataatgtgaggcctttctctccgccgagtcgttctggtcagagcgctacaactttttccatgacatcgactgatcgtgatacaccacaaccttctgcttcattcgcatatccctcctcagtctcaatgtcctcggtgagaagctcgagggcggcatcacgattgcggaatgaggttcatctcagccctgctgacaagaacattgtggatttattcccgttcactcgggcccgcttgattgacgtgccttataaacagcagccgcctatcgacgagacgaatctcacttcagatgatcttcggctccaaatgttgagcgtggtgtttggctgggatggagacatccaagatctgataatagacgagtgtatgtattgccctgtatcttccatcttggaaatagctgttgacagtccttagtgagccgccacgccgtgggtagtcagagtgctattctcttgacccaatggcttggcaagaacgatacagatgaaatggccgcgatgattagctctgggcaggtaacatcgtccgactggatgattcttgccttgagtcaaatgagcggccaagcgcaggcaaacaaggtcggacaggcatttgtacagaagctgcttgagatcggggacatacacacctcggcggcgatcttgcttggtctaggggacagcaacgacgccattgaggtttacgtttctcgcaatcactttatggaagctatcctcatgacatgtctcctgttcccatcggactggcagcgccagtcatacctcgttcgccgatggggagaacatgtcgttgctcactcccagcaacaactcgccattcgctgtttcatgtgtacgggagtggaaccatcagagccgtgggcatctccatctgcccaacaaacttcatcttttgcagagatgatttgcggcaagccttctgtcgcctcgcccgaaccttcgccggccaatatagtgccaccacccgtccggccaagatctacatctaactccaaaccttcactgaaaacaccagccctgaagctaattacttcatttgacgcgcagccagggcgtttccgcttccctggcttaaagtctgatgatcgtacgccaacaaatgcacctggaatcactccaattgctgaatctgctgttcccgagtcggcaatgtctcctggtggatttggctcttatagactgaacaatatccaaagcctgaatcacgcaatgacttctcgatcaaacactcctgctgccaatcggcgtcgtctaccatcgataggagagacaccagtggatgtgcacccgccaagcttctcacggtcaaactcttacagccagaatgagtatagctctacctccgaaaacgaaatgagtggacatgagcagagcaaggacaacaacagtggtctactcactttgtcagccacgaaatacaaccccggtctagactctatcaagcccagtcctcagactgctgtgcagggaacagagaagtttgccgcaatcaaggggcttccatcgccagctgctggtgtatttgaggctcttacaagtgaagaccaccgtaacgggtcccgagatcgaaaaccagatggccttcaaatcgagacattggaaggtgaaataaacccgcaggaccgctccgatttgatccccagcgctaaaagcaccgcttcgacattgaatagctacgcttcggccaggagcccaagtgttagtggccgtagtattgatcaatacatcagtagccttgatgaagcgaactatcatgccaggaagttgcgcccacatactccgggccgtggaaggcgtaacccagacgacactgccagccagagctcaaaagtcaatcaaccacgtgagggctctcgagatacccgcggtaagagtgagcgtcggtacattcaacccgccaagcgctctccttcctcgccggtgcccatgtctccggaagagttggctcgataccacaccgaagagtctgaaaagcgagctgaaacaaagtcaaagtctcgcgccagaagttctagcaaggtgagagggccaggttctcgaaaccgtcagcgctcctcaagtcggcacactgctagccggctgggtacagacaaacgaggccgcagcaatgaccgacaaggatccggcgttcgatcaccgtcgtcgcctcttcctatggcgtatcccacagaggaactttctcaggatgtcgataatcctttgagacttgttgaggataaccaaaagagactgcgatctcgccaccgaagtgctagtcgacgtcgcgccgataaaggaacagcttccaaaagagatggctctccagagaccagacataaaacatcgcaaagtctttctgtgatccaaacaggttctactacatcagatccctgggcgcagcaggaatctgtgccggagcagttgagcagcaaggtttttggtcaacaagacacatccaatgggtcttctaataggaaaccaagctcgacagccaatgatttccaagacattgcgtccccaaggacaccattcgtcaccctcgcagagaaaaagcgaagagagattgccgctgctgaattggaagcacgaagattatcactcgcccgcaacccgtcagcaccaaatatacccttcccgggcgagctgcaaagcgcaaaaagtccccttgagggctcccctccgttctctggtacaggttcatacttccaacgggctccatcgcggaacaaggcttcccagaacaaagcatcacttgactatcccagcagttctgactcgaactcttcacgctctggaatgcccggggggcttccggcaactcctcgagccatgcggcatccaaagtacggaggaagcggacaacacgaagaccgacctccttctgtgcctcttattcctacagacaacagtttcttccttagcaatgcccggtatcaaggagatgtcgaaagaatcggaagatcgatgtccgtccccgtgccagaaggacagtacaacgccccttcaatgccgaacgacctccccacgcatcctcgatttaacccagctctcccccgaagccggtccagcagccgcagccgcgcaaagggccataaccgcaccagctcaggcagctatatctccagcacctccccccacgttcaagtgagcatcgaagagaccatcgagcatgcaatgcagcgaggaccttcagcacaatatgagacaatcccgcctccaccaccccctcccatcctcccggaactgcagcatctcaacaccccacctccaccacccccgttcccacgctctgcaacgcccatctcgccccgcgagtcctccgcgactatcgacattgccatcgacaacaaccaagacctcggtcgtctcctccctcgcgccatgaccgccgccccggctatcaatgtaggcgaccaaggggctgactcccatcagccgggtagtccgcgtacgtcctttgaccaccgccgaaaccgtagctcaaacgagagcttcacgaacaagctgcgtagcttgactcgtatgcgcaacagcagtcgcagtgtcgagccttacatgcaggcgcatgaggcggagatggagagtctgaatgctgggccgaactcgaactatgttctgtcgagtcagagctatgtcgcgccgggcccaaactatgtttaggcagttaaggcttggctggctgacgagaagtgttttgtttgctttatatatcttttgctggtctttgttcttattcttctctcctctcttttgcatcatgagcccccttttttgattgttttttttatcatgaaattgcaatgtcctggatttcaacgtatcacgcatgtttttcaatgtcattggctttggtttgacattatctccgttcacgggctcataccctctctcgtcctgattgattgatattttccaagttatatgacccaatttatattccaaataccatatcctgtcatcaaccccaatcctagggctgattgaatgcacaatttcctagtcactgatttcagattttctttttcaagattgcagacagcgatgtctttaaagatcttgtttccattggtttttgctctcttggtcggggtctccctagctaaacggatatgcctgcaaaggcttaatgataatggtctcaattgtttctagatgatttgatatagaagtagctgttcagaggctaaaaattacacacttgtacatgcaaagatcgacagaaaaaaggcccgaggcatccccaagatcaccaaccgcggtttcgagatgatccatcattgccaatgttcctttccgcatcaatcatgcgatcaaactctgcctgtgcttgatccctctcagtcttctgagtggagtcatacttttcttggtcactctggccaaacccagcagagagagggttcggtgaaggctgtgacacgggctgctgtcgaggctggggtcgtgctccggcattctgtcgtctgatccggtcccaggcactgccagtactcggtgacccatcaatgtttgtattccggtattctgcagcggtagggctagcatcgtcctcctccaggatatccaaagctgattttgattcgggttgagtgcctctgccgcgtgcccagattgcaccaccattcgaacccgattgagacaactccgacgaaggggattgagagctcgcctgggtatcattggtgttcatgtattcagagtaagaattcgcctgcgcgggagcatcgtaagacgcctgctccggttcgtacacatcgtcgcctgcatatccaccaggcatgctgatggcctgtcgcacctgggagccaatgtctttctcgccactgcggatgctgcggacacgctcgctagcggcctggatcttacgcttgcgcacgtcctcgggtttcgccctgcgtacgtcctcgacgaaccgcttcaatcgcgggtccgtcaacattcgcatggcatcttgggaaaccgcgtaagcgctcgatgccatacttccaagactaacaataaagaccagtttgaataccgctgtgctgatgttgcctcttaaggcattatcggcccacatgttacgcaccgtattcaatagtgaggctggggtgggattgctcggaaacagtggcgacttgcgtgcttggttgaggaggtatgctgttccgatgaatgagcttacgggtatacccctccgcgactggtacaggcatcgcgttgagtgctcaaccattgcatcgaattcgtcttgggtcggggatcgtgctgtcagcacgtagtggttctccactcgctcattcactgtgtttgagacctttcgcgtccaggctgctgtgccgaaaaatccaaagtacaatgtgaaaagatcaggcctcacaattgtgtctggccggagtttgaccttgctatatttcgcgatcgcggggttgtggccaggaagggatcgggaggagtcgttcggagaagtgttgttataattctggcctgcctgcggcgaggcgttatcggagctcatggtgagtatccgagtgttgaggaaggttgaggtgagaggtgacagcttcgaaggttggctgggccgtttactgtgacgttacgcgctgacttagcatttgcataaaatctacataactatccagccgtatacaatttgaagtaaatcctcaatttgaatcccagtcattcgataaaaatgcaatatcagtgcataagcatgtgctgatgtcgtattcttactatccttgttataaattctgttgttctgggtttactggtcgggttcaatgccttataagaacccagaaagcctccgcgaaacctcctaccacttctcaatataaggtcgcaagtccaactcaaacgcaaatgtcgtgcgtggctgagtatgcaaataccaatatgagtccgcaatctataactagtgagtttcagacacaaagcaaccaattaagtcaaacttacagcgtcggggcttattttcgcatcctcatgctcaaatacccaggccttggtacgagggatatcaatgataccatcaataacagtatgagagacatgtataccctgcggcccaaactcacgagcaagtgactgcgccaacgcacgcagtgcaaacttgctcgaagcaaaagcagcaaacttagccgatcccttaagactggcagtagctcccgtgaagatcagtgtgggcggatactccgacgattcacgagcttgcaggagcagcggaagagcccgctgggcaaagttaaaggcgcccagtctgatatcggaatcacagtgtcagcatggtccctaggaacaattcggactatatcaagcttggaatgaagcagatagagtgtgtgagcataagagaaagcaaatacgtacgcctgtgacctgagtgcagtcgtgtaatcttcttctgttagctcaaggaatggcttgaccacgaagccgccacctggattgaaaacagcagcagctacctttgaggaagggtactgcgcttgaatcttgtcaaatgcggcattgacactcttcgagtcggagacatcggtactgatgccgatggcctggccgccgctggaattgatttcttgaacgactgggtcgtaattttctgagtttcgagccagaactacaacagagtatgactttgcaaatttcctggcgattgaggcgccctgttctttcatcagccaatcctgccttatatggacagagtagatgtagaccgtaccgtgccagggccaacgccggcaatgatcgcgagtgctttggaagccatatttgattgagtaaagttatctatgaatatgaatgtttgcaagtctgggttaaatgagagaatttaaacaactaaataatggtgaaccttagatatcaccgcttagaaatgcagcggggattgatcatcacatccgcaaatgatatcatctgcagagaatgggactggtgtatccccgcaaagataacatccaaggggaaattaggccattggccgatgaataatcctggatatgagctcattttaaggtctagctagacagcctcttggggagactaagattgttggcgaaataattccaaggttggtatagttcgagatgtcggcctcaggcgcttatcgataagacaaataaatttcccatcgaatctccgactctacaactctcaactccgcatcagacaactaagatggcggattcagatcccttactgagtgatctctgctcaatatggtatgcttatgtgcatttaaattctggtacaccttgcatctaacctgtgtccgtacagccataccaatcctcccaagtaccgctgtccacgctgctcaacacgcacctgctctctaccctgcacacgtcgccacaaactctggtcgcaatgttccggcgtgcgcgatccagccgcatacttaaagcgccaagaactaaacactccatctgcgttcgatcgcgattttaatttcatcacgagtatcgagcgcactctcgagcgcgcggagagagaagttgataaccgcgggattgatcttgcgggtggtgcccaggccgacgatgataattccgaaggttcccaacatccgactactggccgtaaaaggaagcacccgaaccagggccttgccaagggtgaggctgcgttcttacgcggtgccgaaactgctggtgtaaaagttcttcgagctccaaagggaatgtcgaggaataagcagaatgggtcgcgtttgcatcccaagtgagttgggaatctctcatatcttttgattcggaatttgtactgacgtatgtgtttctcaaggcacaagcgtcttgcttggaccatagagtggatcacgtctgatgggctgaagactattcgtgattctgtcatcgatacatgctctgttgctgaagcctataaccgttgttgcccacgtccgaaggatcaagagccagctaccaagccagtgaaggaagagaagaaagatttggacacccataatacaactatcgctgcacccggtgatcctgtcacgacagtggttgaagaggcagatacaaaacaaccatcatccccaaacaaagactcaacaaaagaaccagctgatgactcaactgagcaaacggataaagtaccaaatcagaccatcaccccccaccgcggtctctacttctaccttcaccgtccgcgaaccacaaccaaaaagcctgtcttagctcctctcttgcaatcctcgacactcaatgctgttctgcgcaatcggacagttctagaattccctacgatttatgcactgctagagtcagcagagacactgttttcagacaaagataactctaaattcatatctgaagaagagtatcttcacactgctggaccagatgagataggccagtcttctaccgcgagtgacgatgacggtgcggctggaaacaaagtactcgccagttcttcggtgaatcttcaagatgttgatgagaacttggtactggaggtattgaagaaagatctatttgaaccagtctcggaaactgagccagtatgagttattccggcatgaagagagatatcagaagacgttagccaatttggcacatctaccagacaatgtacgatacatagggacagctaattatcagtcaattgtacaattgtacaacgggtcacctctcagaaaaattatcaggcttagatgcagacgtattttcctgaaaaccacagatcctgctgatcgtgacatctcgaccaaaagaggaaaccacgatcagcgcggcttctgtcgagtcaaagattcttcgagttcaccttcactccacccgggaccaccttgggaatatcaaatgctccaggatcatcatgaaaactaacgttttgtccttcgggatcaccgtgatttatctcggcacggtagcatcagccttattagttgccagaccaccgtcgcagttaccagccaagaaacgtccacagggatgcgattgctacacaatatccgggcctgatccgggatattttcagcactacaaggtctgggactttcgggcagtggatttgaagaaacatgccaatctcaatctgtcggagcccattgattatgacgacgaggactgggacgatgacgctgaggccgagggccaagaaccgcaaaatggccgtctctcgcccggagtccataatgagaaagacccggaccccagatcgctgttgttctacaaaacctcattcgagaaagactggagcagtcaaaactgggaacgtcgaggcacccccatagccccagtcctcatgataaattcaaagcacaacgtcttcctcacccgggactcggaccagaataatcctcacgcgacgtatctcgtcctgcgtaccactcgtttttcagaatacacctccaccgcggaaatcgagactcgcatacgcaatatctaccggtgctcgctgcgtgtccggctgcgattattgccagccggctccgtcgtatcgcaacctcctcagcataaagaatggccaccgcgggatccacaacggcatcccaccgtgcccttgaacaagacgattccgctccgtgatagcagaccacctgatggcgcttgtgctggcatcttcacctaccatgattcgacctgtgaatctgacattgagattttgacgcgagacccgtcacatcgcgtgcattatgccaatcagcccgattatgattttgccgctgatcacgagattcccaatgcgagtaccattgccgatatacctgtcccatggacaacatggtccacgcatcgcctagactggctctcggacatgtcacggtggtatgtcaacaatcagatacaggatgccaaatcgtacagagttcctgagttagagagcatgattgtactcaatctttggagtgacggcggactctggacgggcgacatgagaattggcgacagtatatacatgggcattgaatacatcgagctggtttacaaccgttcttctgatgctttcagggccccttatgtgtctccttcgcaaaaccaggcccctcccacgaatggttcttttggcaatgggaatccattggagccggatagaaaggacgaaaagtgcaagccaggtaggcagggccgcgagtgcagaagaaagaagtggaggaacaggccccttcatgaatcctgtcgaagaccatgtaacattgatcaactctaggacttcccaggcagactgtttgtattattatcggttttattcaatattttacttttagattcctggtttcgactggcttgcttgttctgtcctctagtttagacaagatgaatgttttctcagagaaaatagatgtcaacctaatatgcttcagggctccagagcccaactttactatttggatactcattgcttgtgtttagtcctgatatcggattgaagagcaaaacactaacataatagaaatacatagactctacaataagaaaggagatgctattcaggatgaagaaaacctcccaagggaagatagaagaacaaggaaaacaaagaaatacgaccaaaccagttcacgaggaagggactgctttgtatcaactgagtcaccaatggtggtgaccgtggggtatcattcattgcaaacatcacatagaaagagcgcgccaaaagaaaattcattatccttttctcatcttccccgtgttgttcgccttgcgcgccagaatatcaaataatgtgtaatgatgaccgaaaacgccttgatgagggtgcttgatatggataaatgtgggtgggggatggatgaggtatgtgagattatgtaggagggtgaaaacttcaatgcatgagatcgacgagagagtgcgatgcttctgtagccatagacaaactggtctttggtgttcatttagagcaacactgcacctgttgctttgtctcgtgggttaaactcgccgtgaagaccaccgttcatgagttcagcaacaatctttctgcgaagaagtgtgatgtggcctgggccaatggcagtcggctcaaccccaacagtaattgctttggcgttggttaggaggaaaacaccacagtcacttccgttatcttgctgagaagagaccgacggtaggacggtccactcctcatctttgtattttggcccaagctccccacgaagccattgcttgacgttttttacctgccgttgaccgcgggatcccagagagtcgaaatactctattgtacggtctgctggtcgaataaccatgagagtccaatgacttgactcatgtacagggatgaagactgtgtcgacattaagcagtccttggccaccgatcttgacccgagttgcccatcgtttcacgccctcataccccttatcacgaagggtggagtagaaaaatgtgttgaaagtgtgaaagagcggccgatcgctgggtccgaggttcccatgcgattgacggagataatgtacgagtaaaccaaggtaggcattgatgatttcgtcattgagccaggcctcaggccgaatgcaagtgatgatatcccgttggtacaaattacctcctgctaatgatgtggcgacggcttgtccttgtccactctgcacggcgcattgaagtttggtaagccactcgggcgagatcagacgtacgggttgaccctggggtatcactctgatcggacgttggagatcgcgctcccgctctaatctttctttctcccgcctctcgaattctgcctcgtaccaagatgcaatgcgattggcaggaatcggcctcctgttggcataaaacaactgtacagcggaaacagggccatgcggaactcttgcatcttgtcgagcttgttgatcccacgggtcatcaatatccataagatcatcttggacgggcttgggggcttcagttggtctcggcgatggaatgcgcctagcgctcggaggaggagggatatatggcggtaatctagggtggagatgtatgccgagatccgtaacaagtgctggtgctgcgcgagcatctatgtccataaattcccatcccttcggtgggatatcttcctcctcgatagtcgcgccttgtgatacaacaagtgtaggtgattcgggaggagttaacgggaaggctcctgggatgggcaagtgagagttctccaaggctaggctatagtttagtatatgcgacatttatctccaagtagaggccaccataccatcgcgggcgttaattgaaggctttagggcctcgaagggattgggaatcttgagagagggctccgtgtactcagtgagctccgtgggctttgcaggggagacgcgccgcctgcatcgaggccagcggaagaaacccatgttgctgcgaactctgaagtcacctcgaacgacgggagtaagaaagatctactcgtccggtgacgcgctttcgagtaggttggcagttgaacgaacgttgagggcgtgaaaagggaggaatgagcgggtagatgaagacgaggcttcaagatccatcattgggcatgactggaatatctatcccaaacccaaaatcgaaggcaaatactccgcaaaggaagaggtatgggaacattatgagccgacgcgatgcaccgggttctttcatcattctgctgactcagcgcatattccgcggcccagcctccattgttgcgttgatcacttcagtactctttgatagctgtttatagagtctgccacaggaattattagatgaaacatcaaagcaacatgagactagggagaagaaggaacgatatttagcagaagttgaaggataacattcaaaggaactcctacaaaaacgatatacaaacaaagagagacaatatgtacggagcactactccgtacacaactcttcacttgaacgccctttgttctttgcctctaaagatcttatatgtcgtggttcatgcggctagtctcatacctgtatttgagcaggatgtttgactagaccgaacaacaactatgaatattgctttcaatgcgtatgtacatggataacgtaaaggatacttaaggtgacctgttccagcacagcctgctgagctaggagcaggccgaggagttagtggaggtaagggaagagggactgcaaggcgaattgcacttttatcaatacatttctcatcctcgttatcgggttccaagtccgattaggtcgaataacaggggtgcgacttcaatgaccacccatggaatacctaatgaggactgatatcagcaaaggttctgtcaaaatacaggggtttcacatacccgcatatacaactagttttgtcactacctccacatcgtaccgcacgcggggcttcttgatctgtgagaagacttcttgttcatcccgctccccagcctggatgtctagcgaggggaaaggtgttgttggaatgtcaaaattcacattagctgccgatgacatagggctacctcttcccatcatgtcttcataatcgtccagtgatgccgtctttcttggccgcacgggtgttccattgagcttgttttgatcctctgcgaccggagagggatgattgctcccagattgactctggcgtcggcgtttctcccggtacgccagggtctcatacgcatcagcttctgactgaggaccaattgaaatggctcggcggcggggatggcgcatcgtggtaaggatgtctgggatgtcagaaaagttcggaaaaacatcatgatcctttaggttatagggaacggtggtgtatttcctaggaataggtcagcataatgtccactggcgggaagtacagtcgaattcgaacttacgatgcagtagtgaagaaacgtcgagggagcaaaagcccgagcttctccagagtgcggaagataggtggcagaatgcgcagcagagcgggctttgttgcaattctccaagcaaacacacacaaaacgcccatgaaaagacgaatgacagtcttaatccaacccactgtcgccagatcgtagggaattgatccagacggataacccacccagatatcggcgaagtgccatgaagacacatccacgcctagcatgacacctgcaaatgcaacactatcgtcgaagcatgggcaatcatctgccggctccgggtggatgcggacgagaaatatgatgagaagtcccagcaaggaaatttccttcggcgaggcggacaaaatgaattcctcaaaggcaggtccgtaatgaaactgtatgagcccgatggcggcacccatagcacaaccaacaacacagtcgagcatcccatgcattccgcaatacagtcgacccaatacaatggacacgacatagacgtaggtgacggcttggagtaagagggtgacctgcgtgccgagagttgaatcgggtgaaccaagcagggctaaagcataaactgcaaccgaaacagcgttggtggaatgtgtcgatgggaaaccatattccagggctgcagaaccggacatggtgattcgctggagtggcggggacagagggcgaggaagacagagtaggtctttgaggaagccgctccaaaagacgcctgatgctaagatgtgtactaatctgtagacgatcactatcagccacagactcccacttgcgcttccaatttcagaaagataacgtacccgcgacccatactgggagagccacaccagaataggaagggtaagaagaccatgaagaacgtgtgggtgccgaggttggccgtgaatgcgaaatacgagtcgagagtgggcgtgcggactttctcctgtacccaagccaaatatggcgtctcataccggatcaatgggatgagcttttgtcgcggccaataccgccagaggggcagtcggttcgaatctatgtggcagacgtgcgagggttaggacatcgcgataagccacaggtggatgaaaatggaaccaatcgcatacagtgattcagactcttcagcccagcatcgggctggtctttcttgctcgtgcccatgatgcagtgttatcgattcagacaatgtcgcaatcgaatggattccatggaatggacaggccgctgcctgccagtccgtttgaaaggttgagggatatagggatcagaacataaggagcgaattgaagttggatcgaagaaaatgatataatcgagaaactcgaggttggatcctccaaagtggacggggagatcatccgcggctcaaacccctgatgcccatgtgtgtgcttagtcattttgcattggggctggcccgggggatgctctaacggagtatatacggagtccgaggcatcgatttttactaatttgtatttgatgttgggatagagtctctcagctgtagacctatattctgtacagagtacggagtacgaagtagagggtggaatacatatttatgtcggatatatgttttgcaatgtatacctatctggatcgtccttgaggtcgaatacatgtcaaatcgttctgatttagattttgaatgactatgttgtatgcactttgctattttcaactggtttacgaactattttgttcattacctggtgatgctactccgtacatactagttatgtggctcttagcttgtgctgtgaggatcctcttgcctctccaagtttgatatactctgattgacatctcctcggagagagcgagataaagccaagaaatataatgtaataataatagtatataaagtcaactctcgtaccttggaggctgtttagcgcgggacgtcggtcttctccgaagatgacatgcagagttagtgagtttttagtttctattctattatatggcttcgccacaagatttccaattaaatgcttggatttacaacccttctccagatctgagcctatactagacacaatataagttataatataacttataccacgcaaggtagaagaaagagtgtgatgtttgaaatatctacaaatcacatgacttcagataaacttgtataaccacaaacttggatatgccacagctgaacagtggggaacagggaatatattagcggagtcaaacccaaaacaggatcaagataaaccagtcaatgtcagaatacaggatatagaggccttgaatcgtgggaagcggagccctggcgtcatggagggacggccgttgctatggtagcccaggggggtaaacacgggtttcacggtttcacaggtctcgccagaccctcttgctctatcgatcctctagatcatttttagatctatcttctcctctttttccctcctacatctcattccatatcatctcttccctaccagacttaacacaacgccgttttcctctgtatcacattacaaacgagggacattcccaaggtccaacccctatccctgcatcatgagtgctatgtacgaagaccaatacaatgcagcatcgcgccgtcgctctctcgttacccctcctccatctttgacaccgcgtcacagtcgtacgcgcagcgacagcatccgagtcagccacggcacggccagcaccaacaccagtgtctccagtggacggatgtccgaggcgacaaatatcactcagccgccctcattctcaaaaaagtttgtagtggtgggcgatggcggatgtggcaagacctgtctgttgatcagttattcccagggttacttcccagaggtacgttcggcctacgaggaaagatgtgtccctggtgctgatcatcatttagaaatatgtccccacggtgtttgagaactatattacccaaacgacacatcgggcttctggcaagaccgttgaattagccctctgggatactgctggacaggaggaatatgatcgtttgcgtccgctgtcctaccccgagactgatcttctatttgtctgcttcgctatcgattgccccgcatcattggagaatgttgttgacaaggtgagtcctcaaaatggaatatctttgctcgatttgtctaacatccctcctcttagtggtatcccgaggttctgcacttctgtcccaccacaccgattattctcgttggcttgaagtccgacttgcgcaataagcgaacctgcattgaactcctcaagacacaaggcctgacacccatcacaccagagcaaggcgaaaatgtcgcccaacggatgggagcaacatacgccgaatgcagtagcaaggagatgcgcggcgtggacgaggtcttcgccaaggccgttgactcggccatctcaatcgaagaacaaggctgggtagccccgcagccggctggccgtaataaccgcaacaatcgcgccagtgccgtgccttcagggggtggaggcccccgccccggcaagaagattaagaagcgcacttgcaagattctgtagattgattctactctatctgtatttccttccattctcgacatcctttgacctttttttctctcttggccggaccacaagcctggttgcttcgtcggcttgcttgcccgctcgcctgtgtatgtgacatgtcgccgcaagctggacaaagctagacatgactttccaaacccttctctgttgtatcgatacgctgcgcggcccttacaatgatctcgattctttttatttttgctggaggctgtttcttttattccacctttgttccccgcttatttcctttttttggcctttgtcatgacccttgccctcgttccatttgatgtctcttatgactcgggtcttagccgttttccattggcatgcatgggaccggtgttctcgtttgtgttatctgatatgttctgttggcgaaagcgacgtcctttgtgttactaaacaatacatttgacctattgtgtttattaatgccttccccgtatgattcgtatatatttcccccgggaatctaactggaattttgaatggtatctaagaaaagagaaagaaaaaagaaacaaaacagcccgacgccgagacccgtcatgcagaccaaaatgtaaaataaaccatcacggcatggctgtcgagtcaccctcgtcttcacgctttattcccgacttactcgcatcactctccccactgaccttccgcttcacattgccattgccagcctcctcgccttgttcttcaggccggcccatgaaattctcaaactgggaccagagagcttccacagatccaaattcattgcccacctaataataccattagtagatgctctccctgtccgggtggtgaaccttaccgcaataacactctccaaattccgattcagacggttgatgttttgaagtacttgttccataccctgcgcgaataaattagcatcggttgcggcggctgataaggtgggaagttcgtagatattggtacataccactgcgatctctcggacgagttcctcgcgctgctgctcaaagactgttggggacgcgcgaccgccagagcctggtgtctgctggagccaggccatttttttggcttctgaagactagatggcgacgaggaatggcacgacctggcacgttcacgttgtgctcaaagacgcggcggttggggtttcggggagcgtcgcggatgattccttggcgttggatgtttgactagacgcgggcttttgcagggaaatatccagttggagtcacttcacagttacagtcgcagtcacagtcgttgcagttggacaatttgagatgaggttgatgtggggcaggtttgataagagataaatatgtatggaaatggcgatctacttccatcttgtatgtgacactctaccaaatccccggactcgtctctgaaatctatatgattgaactgaacaccgattctatatttctcctggaagttttctggcgttctggtccttgaagacgtttgcattgtgctcggttcgactcgagaagaaaggcatctttccaagagagcacacatatttatgatttcttcgagcgagcctgacgaattcttattctgagaaacaacaggctaccccaggcacaaatttataaaggtagaccatatcaataattgtatgaaggcaccaaaatatttcatctatctcatcctgatagtatcacgcgatgcaaccgttgatataataccatatcctgcagcttagtggcccgcaatcaagagcaaggattatcatctttatctacttatggtaagaagaaggcttaggagtcaaaggaagtgccgtatagttacatccgagttctagacttatgcataagccacacggaggccggtgtgcatcgtcagcataacttggcatagcgtgggcagaagatgtgcttatgcttgatgcattcattccgagacttagcgccgcggcattggaaaggggtgacatggagaggcccacaagtatatagaggcgcagggcaatttgtggagactcggatacagcaagctccgtgaggttgtcaaattgaaaactccaaataaagtccgggaaggtaagaatttcatcacattcgtactgtgtgtgagtgacagttgagctgagtacgataaatgagagcttcggagagaatcagacgacaactctagtcgggaatgtcgtacgaactctaatgttcagatgtcttgagtttatatatccaaaaatataacaggcttcagcgtttaggattaggtttgaaaatcccctgaatatggtgatatataagtgtccattactgtgtgcaggccctgttaaatttggtttctaataggattagacaacacgctcaacgacacaatggttgaagtcaagtatatgggagaatatgactacataccgtcaataccagctgccgtgatatttattggtctatttgggatcttaaccctcctgcattgttggcaagtgttccgtggtcggacttggttcttcattccttttatattaggaggaatatgtaagtaccagctcaatgaaccctttccttgggccttttccggttctttctaacacaggttttctgcagttgagattgttggatatatagctgtaagccaatctcgatactcgatcaagcgaaagagggaatatgctcacagctctagcgtgtcgtttcttccaagcaatacccgaattataccattccccctcttgccatacaagccatttttatcctcgtcgcgccgtcactgctcgctgcgagtatttatatggaactcggccggatcatgattgtcactggtggagaacacttgtcaccaatccgacgttcgtggttgacgaagatctttgtggttggagacgtgatatcatttcttgttcaggcaggaggtaagacgtccctcgacgtatgtgcgaatcttgcatctcctgattgactaacgatatattccaacaatgcaggagccgggatgctcgtcaaagccagcacagcagaaaaaggcggaaatgtgattaaagtcgggttgattatccaaattatctttttcggcctcttcataatcaccagcatcattttccacgtcaagcttgtgaaaaacaggtcaagagtgctacaacagcacgaagtcccctggaaaaggcaccagaccgtgttatacatcggcagtctgctgattttcgtccgttccatcttccggtacatcgagtacaaccagggaagtagcgggacattactccagcatgaattctggagttatattttcgatgccgctcttatggtgctggtaatggccgcgtttaacgtggtgaatccggccgagattagcaggttgatggaagggagaaaaggcgaatatgggacggagctgattggatgattgagacgactgccgggaaatccccggggatattcaatcagaccgactcaacctgtattgaagtgatgtaaattataatcttgatagatcgagccagagtccatacacatgtgaggccttagtcccgaagtctgtccgacattctctgttcgttttgctacagttctcttttcaacttgaattcagatttcaatccgcaggtctctcgtatagctctacatgtacgggatttggtctagggtccggcgcagggacagaggccgaaacagtaccaagtcgcgagtcgtatcccctaacacgaagagctgttgtgctagacaagggaaaaagggaaagagctatgctagctatacgttcctaactctcagagatatttacagcaaagtgtttttattagcttaacgaatgttccactccgagggtccagagtccactggtacctatcctgtacatactacaagcctgacaggtagtgaatatgtcagagctaagaccccgccggatttaatatttgccaggtacaaagttcaagaacaaacaaccgggtcaaatagaatttcggttactgtcgcttcataggaagaattcggaccaaatgtagttatggtttatggtttatagtttactacatcggctatgcaaggtgctatggctacaagcgacagggaaaagtagtagaaaagcaaaggaaattgtaataacaagaagcgaataatagacagaagggaaaagcaaaagacaaatgtaggtctcagaccgttcgcgttcttccttagtttctatacatgtgccaaaggaccaatccagatccaaatccaaatcctagacaagatcaaatagtcaaagcagggcaaaatcctgtgcccttgtcaaccagactagtgccagcaaagcagatcaaaagcagtccgaggctaaacgcttgataacacccgaatagcaaggtaacatcgtcgcgcacatcatttcgtatcattccaattcgtaatctcatttgcaatccacagttctcggttcatgtcacagtgccccgggcacgaaacacagactcaaccccgatagtcgagtcgtgaatccgtaaaataaaatcatttgcaatttttgttttttgttttttgtttttttgctcccattctcacatggcaagaaatgttcgagtattgtccacccgagtctgaatatgtgcctgagacatatagtaaagtggaatatagtattgcaggcgggggtgtatgtgcttaagagtgccggcggggttgcgcgaggatattgctcaaccgtttccagcgcggcgtcggggatgtcgagttcctccgagacggggatttttctggttttgttgatgtttgtgtagaggaacgggctcggttgttgatggttgcttcatggtcggcgaggacatcctcaaggcggacgtcggcgtcagacatacgtcgagagtccttgggatcaaggatctcgatgaacttggagggtgtatcacgcattgtgtagagtattcttattctttgcgctgatggaggagggagaggtatgatttcaaatttcaaagtagagggaaatccagaggaggtcacgaggacgtatagttttgtgtaggttcaagcgcgagatgaaactgcagcctagagattcgagtgtttcaagttttggagagaatggaggatgaagaacagaggatagtaaagtagagaataaaatagaaaagaagggagttttttttataaaagaatggtaacggcgtccgacagccaaaaaggaaatgtgaatgtctgtaccgaagatcagtggagtcgaagtataagatttgtggactatcagagcgtgatttctttgggatatttgggatgtttcatacttatagaagaagtacacgtacaagctagtacgtaccatccatgtaggcaacatttccaccccacaagccaagtgcatacaagatacacatacttcgatgcacaagcccgtttgggcaatgtccgtttgggctgcggggcgatgatcggcagctacttggtggcgtccgagtgacgatgaaccacgatgaaccatgatggttcgtagatatatcaagaagcatttgatgcaaggggagtcgaatttggtctagggtataagaagatcaaattctctcttctgttctccttctatagacaggaactccgagactctagccacgataaccttgtgcgctactcgtcttatcttagcttactttttgtggatgccatccatcaagcgccatgacgtcgatggcatgaaatctccatcagggtttcgatgctcaaatactgtagatgggtcgatgggagatcggctcctagtatgtatgatgtacattggtcaatagaatgcatgtgcgccatgtggtacgtcgtcttctataaaaagaaccgccacagcaattagccacttcaatctgccgcgcatccgaatctcttccaacaatttctcatataatatgaggcaaatgtgccatacaacatagggaggaaaggaacgcgtcaaaagggacaagggtgtcagaacggagtatacgtaggtggattcgccccaatggagattgctcagggctgtgcccggaatgtcaaccgggccgtcgggcggactgtgcggactattcgatacacttatctctaggaaagaacgggatgtccaacagggatggcgactatattcagtccgcgaaatacgaatgagagcagtacttggagctactattttctgtcgagaaaccgatcgccccgggccatagtgtcactccttcagtgcaccggcgcacacgtacattcgaaatgtggcgatgcctattggatttactctgtggtccccctttttctcaccggtgcctctgggtgaacagcaagatgggagtaccgggagatgttgccgccataatacaccgtcatactcgttgatagtcgagcagactcgcgcagcagaacacacacccgagtgtccaacaagcctagtagactcggtacgatctggtgtcaggcgggcgtagcagacctgtggcacacaccgagtagtctactcattcaatggaacagtgagtcccactgcgccaaatacactgctccaaagcagcgaagcacacactttccgatcaaaatggtacgtttctccgaccgaagaattgtccgcggatgtaagggaatacaaatggagaaaggaagaagagaaagagatagcttttgatctggaaaaagaacaaattaggcagtaacaactgcgtggagtcaacataacataacgcttatgtcggggtaagtgaagtgtgatagtctcattctaccaggttcccgaggtcaacagtcatcaataaaaagtccttttccgttcttgaacgccataacttcagctaaaaatgtatgtagcggatcactcccagcacccctcatgtaccgcactgcatcgcatctccattccagggtatgcgacatattatttaaattccatgtccgtcatctcgattgcgttggccgagcccatccagagaatgttgttgcatctgtgggaaagaaagagagttagccaagctcgaagcgcatgtatctagcccgacgctaaaccaatggaagcgcgcatcgcatacctaatcagaaccaagcccaatgcaccagttggctttccatcgataaactcttgtgtgtcgcgcagcaggacgttcatgtatgaatcgatgctctcgagagtgcctttgtattcggtctggccccactttaggcggatgaggacttcagtgcccacgctgtagagatatgtaggttagcaaggtgtcttaatagcaacgatgcatatgtgcgaatgtctcgaaagatatgctgcttgggctgcttggaccggggtggggcgagtcgcataccgagcctggaggaagggacgggggttaagcggttggaactgtagaatagcaagttagcaattgaactcatgggaatagcgcgcgggatcttgagcttgaaagcgggctgagcttgagggggagaatacggacactcattgtgactcgagaagagttcctggttggttgaggtggagtagtattcaggatatgatgatagcaaaagcccaatcaagatctattgcttcgttggttgatcgtgcttgtcgtgttgttaactgcgttgacatcggggtcggcgagatcgcgaaaatgtgcccaggtaagctgaacaaggcggtgatagatggccaattaccgcccgtgtctcttcaccgccctctgcataaaagtgcttgggttgacaatcgacacgatggtttttgctgcttttaggtgaatacactgcattaaatccttagagctacgagaaagcaatgaaattcatgttatggctcgttttctcatcattggtgtatctctcattttcagcatgctccgcgcccctgttcccatcacagcctccaagactaagctcccacagacaccagtaataatacaatgggaaaaaaaaagaatcggcgttcatcaaaagttcgtagatgtagacgcctataatcttcatcgccaggtagatctccgcttagcggccaacggtccaggtgatttccttgatgctgacttcttcacccttcttctcgtcgtagtcataccactcaccctccataaggtcaatgccagagaaagtagtagtggactcaatagccttagcttcccattcaccctgaattatcttcgtcagcacatgaaattacctaggtgaatctggtgaattcgggatttactcacgtcgggcttgaactcaatgaactcgaggccacggcaatcgatttcgaggatcttctgggccttttgcttttcctggacctcatagggcttaggtccgttaatgacagaggcagtgtgggttttctatgtggctgttagctgtgtgatcatggaaaagccgagaaggccagatgattcatgtcaacaaagcggagtaaaactgagagttatgagtttcgcaagaaagagggaaagaaaccatttccagctattggattggaagaaatagctcgcttaccgtgcacagtcggcacttccacacaaaattagcctcgccgcggctaccggggatctcgtgtacctcctatacatcaatccagttaataaaccattcaatcgtggcgaaatggagagcaggatgtaattaatccacgtacgaaacggttgaagctgacccagttagggtgcgtctcgtggcaggaggtacattgcactcggaaagtgtagaagtagggattttcctcagtgtcggtgggctgaagagcagtgacgctgtatcatcatatcagctttttgactctttgataacgatgtctgaaaggatctgcccgcgcgacgttcctggaattggagtgcagtgcggggagatccaggcacctgaaaaggctcaataatccagcacgtaagaaaggagcacttacccctccatctgagcttcgaccgaaagagtgagcatttttggcttgcgaagtaaatttgatcttgaggtgtgatggctgaagtcaagatcctctctgtaggtgatgcggggtggagatggaaaatacttaacgtagatcgagggcttggcatgtgaccactctgtaatgattgagcttatcaagactaaaaatatgacagaagtgttaagaggaacttggatatttgaattgtgattatattcatagaaattggaaaataaacgccaggaatgctcaagctatcgctcgcaatgagcgaaacaaaaaagcaaaaaagctatatacatctcgaaggtaagatacagacccaaaaacacgtcaacattctcacaaacggctctgttgagaatcttggccgagaggcttcgttgagaacgcattgaagaactcgttgagagcgtcaacagtgccacttccctcaaccagctgcacggtgcaagcaacgtggctgtcaggacgggtgacgacaacaccacccttctcagcatcaaagccgagcttctcgtgggctgcaaattgagcctgaggaacgcgtatatcggggatatcatcggcatagaggtggtggtggtagtcacgtaggacctgggggatggagtccatatcgatgttgttcttggagcctgcatagatcacagagagggtgaagagcttggagtgagggttatggcgctcgaagaatgacacatcggtaatatcagaccggcgatacaccgaaaggaacgagcgttctttctctaggttggctgccaggtcggcaatggccttcttagtcttgaactgattgccagcgaagatgaagatgcggaatgcaccgttagcgggcacttcctgctcaagctcgacaaagttggaatcggcaagacgggtgacagtggtcggggtgaaagcgcgacccggggtcagatgaacaccgggaatcttgaacagaggggacttggcagggtggctcacgtcccaggtgaaaatattgggccggtaggccactccgtatccactggtgaactcgcaagatgacttgaaggtcttgacgaattcgtcctcctccccaccagcacccacggtggtgtcgctggcagaaccgacctcgccggcagaaggacggcgcttggagaatagggctgcgtacttggaatcgaagttcaacaacgtctcagcgatatccttgcgttcgctctcgtaggtgctgagaatagaacggttggcaaacccactctccacggcgtggatcttccaggccatgttgagtgcgtcatggaaagcagtgttcattccctggccggccttgggcttcaggggcgttagcgatattgtgagagcaacaggggttttaacggggggtaccaacgctatgagtgtggcaagcatcgccacccataaagactcgctcgtcaagggtatacttttcagcaataccttgtccaatggggtagacagagtaccactcaacccggtcccactcaatccagtatggcttcagaatgttcttcgcagtctgctggacctcctcaacagtggcagtctttcgggggttccaatcggcgtcggtggaggaggcgatctggacatagaggcggaccatattgtcctcgcggggaatgaccatgattgagccagcgtcggagtggatggtgcattttgtctgtatactaacgcattagaaacatagaaatacgtgacattggttcttgttaggcatgcccacctcaatgtcagggaagttggtgcgcacgacaccgtccatgacaccccaaacataggcaatgggatccttgtggtggatcttgatgcccagctgctcacggacaaagctgcgggcaccctcgccactaaacaagtacttggcgcgcacattctcgataacattcgtatccaagcacttcaaattgacttcaacagggtaatcagcgttcgcaccatcgttcttgaagccaacaatagtccatggccgctcgacagttgtgccagccttcttgatttcatccaagaacacgcgctcgatcttgccctggtgaaccagggtggtgaaagggtagcgggtatcaataaagcgggggcaactaggccagctgccagtacggccgatgccagagccgtcagctttgggatcccagaaggcaacgtcgtacaccttggcaggctcgtaagccatgatcgagcgcttcaagccaaggttgcgcaggatctcggtagatcgcggctgaataccgtcagcgcgaccagtagcggtcggcactgggcggttgtcgatatgcttcaccttgtagccccatcgtgacatacagagggacaagagcagaccgacggggccggcgcccacaatgacaatatcataattctcttgttggaccatactgatggccgaaagcaaacacggggattggatggagggcagttataaattggatggcgcacggctatgggatcagcgtaaataagtacctatggcttgaaagaaaagcagagtcgctcagaggttcaccctgcacaatgactgggggagaatgaatgagggccatggctatccctatatactgtccgagaactggcgtaagtgggcaaattgggtgttcagctgaagtaacggagaacatccacggcattgagagtcggcgaaatcgtggggagcaccggctcaagggtcagggtagccaatcaagttcaccagaaacggagttatgggcgatttgtcagaatcgcagaaacaagcgccctgtggggacaggcctgggttcccacaatgtccataataccgtcgttgatcccgagctggtagccgcagagctccagtgtgactggattgctgcgatttccctctactccacccggaaacgatctcggtaagcggacggctggacacgtgaccttcccctcggcaaccatccatatctctgaacaacagctatgatggtagtttaacctggtacttacaccacagataacccgaaattatatgccatgctctagatgaaatacccatgaggtctggcacctactctaatgttgttccctcggtctctttccatgccactcctctttcaaaaaggaaacctacattcatggatggtcataacaacagcattagatggctcaagtcttattctacaataacaccaccgtcatggttgaatggtcgttatttttttagctcaaagctaccaggtttccgacagtttaatcttgaagaatatattaacgcctaaggcaacaacgacaaaaatagattaggttgggtaaaagttgtaccgttccgaactatatccatgaactacatgtgtagaggaaaaaggacatatgaggactgaatacataatatgcatttgtgagctatgtataataagtggtactagacaattcatttaccttactatcccttatagataatatgtaatcaaatcttgggagattttgtaatatccttactattactgtagtgtgacgggtggtcacaacacataaaatgcgttatgctagtcgtgagctcacacattgttggtagttctatttatttattttgtagtgggctctcataggtgtgggtgtgtatgaatcattgtgatattgcaataggcttgtccaggtagtccaggtcaagcccccctgttatggagatgtgctctcatagcatgtcgtctttttagggttgactcacactactaggatgatgtggtaaataggcgtttgattggtcgctccattaccaacctccttgattatgaatattaaattattttcttttttgtttgatcattcattgtttattcctatgtactttctttgttccaatattctttctctatgtccattctctttgtttccattatttttgagacattgccagccaccttattgaactagtcctattgttgcagaccaatatactcttttcggccgcaaagaatgacctcggttttgatactatgctttattgggaggtcatgaataaaaattaaatagctattgtgacgagacatggtgtcgccctaggactcgacaacagcgctgcataaatatcctcttcttccaataatatttcttctttccttcccatacttcttgatattttatgcttctgtttctcgggcttctgcgttcacctttctgcaattgcaactttgacttcgaacagcaccttgacagtaactgcaacaatgtctcagtatccaccgactcgtccctgggcagctcttagcgccattgaccgagatcacgagtcgggactcttctacgaagatgatgttcctcacaccgcaaagatgactgttaacatgagtcaacctgacttcgaagaccggggccccagcatggctgaaaatcttcgtgttattgcggaacgcagtgcagctcgtcggaatggaactgctatgaacaagaacgatatgtaaggtccatccttactaacttgctgaacgtgaaatctaatatgatgaacaggttttccaagccattgccacccattcctcaacaggaagcccctcagtcggccgccacagttggtcaggagggtgttgttcaaggttctggggacaacatcgacaagatgagcattcattacgtgcttgatagatccaacatgcatggacgccacgatcaatcctcatttgctcaacgtgaagcttctcaaattgctactcaagttggccagaaagcagttgccaatggttgtgtgcactcaagtgagaagatcaaactgaatttgcttcttgatggatgcaagctggaaggatatgacgatgagactccatctattcaacccagtggatctgagccgaccctcccacccctttcgtatcactcctacaatacgcaagccacctacgccaactcctcctctgcttacggttgcttggctcgggaatatgatgctctgtatgatgctcctgcatccgagacccctggttctcaagtcaatcccagcccttatcgcaacggtgacagtccaacttcgtggtacgaatcttcacccacttgctacgagttttctccgggtcctcagattgcattggttcccaacactaccccggtgcacgaaatcaaggaagaaaatcaattcgcagacctgggggccaccatcgatgagctgcttgccttgatcaacccggaaaaagaatactcacgccttgcgaatgacaatcacagcccagaaagttcatcttctgcttaccatttcactacccccagctcggtgtctacagatatctaccatgcggatcaatactctagccttgcttaccaggctccagacttcgtcattcgtgatgctgagagccctgcaagccccgacaccattcgtggagtcacacctgcatcgccagcatggtccccgccatccccttgtcccaagggatgttgctattggtcttcggatgatgaagccactgcatctcctgaacctcagttcgatcgggaatggtctgcttccgatgtgtctctgcaagagtcacctatgttgccttctcttcctcatgtcgcttcatatccatcttctgagcgtcgtgccagctacctaaaatggagagaggagagagcgcacatgattagtgccgaggaggctcttgtcccacggcaattgaacgtgatgaagaaggccactttcaccatggatgtccctatccacaacgtttcccagcaccaggcagccgtccacacgtctgattctaccgatgagggccctagccgcgcagcttccttcgtcagcaattattccgatgtcagcaacaccatcagcagcgcaactctgagtcctgtcccccgcagccctgatgtctccagttctgagggctccgtggactctcgtggaatcaagcgcaagcgatttaccaagaccctctttggtaagaaaggataccttgatgactacgaggggcggcgcgacacgagattccgcttctttaaggaggccatcgaaaggggacattcaacctttggcaatattaaaggaatggtaagtgcctcctgactcatcttttggaactatgacggggactaacaatctttttttttgacagttttgggatgagaatcgaggtttgatcagcccatcaaccaaacccagcatcgtcactgagaacactgctcccattactctgaacaccgaggtacagtcgattctgtacgccgagattgagggcatgatcacccacgccgccaacgaattcctgatgaaggagtactatgacggtcacctctctactagttctctccaaaaggtgaaaagaagatgggagaagaagcacatgcctggtgtccctgaattccgtttcgaccaaggtacccagtaccgcattatcagcgcaaaccgcgagcatctcaacttcggtcgacccagcaacggccttggccggaacaccgttctgggtaactggaagcggatatggaagaatatgagcatccgcaccttcgtgtctcccgattcggttatcaagaagaacatccacgatatcatggatctcctggagcttttgaacgccagggaaggtcaccttgaactgcttatggccctcgatgcgcatgttcgtggacagctgcagaagcacgagatgttgctgtactactgagatactctcgctcttaacttcggctttgtcgatttcaacaattcatgtctctttttcgttttcctctgctattctgtttcggctgttctgttctaggaggtcatcagtttcgcttcttgccagtttcgctttcgttttcgcttttactattttttcttctctttctatgcgttttttgccagcgatgagatcaaccaattcagtctagcgtatttcaaatccaacatcccagatgaaccttttttcttttcctagtagaccaactggaagtaagcatccctaggtaagatattgcaatgacatcacatgaaccgaaagagaattgatagctaacgaattcgacgctgtcttgaagcgtgttggctagtatggtactataaatagttggaatattgatgataacgtactgagtcaatcaaattagaccactcatcccttggcaatttgtcagacgttagagattgaactaatttccaaaggataatcttaatttaatatgtattcccaacataacaggtcaattgaagcgaaagagcaccgaaaaagtgaagttgtacacaaaacacgtggggcgacgtcatcggcttatagcacgggtgccacctgggcaggcagtcaccgctctgcttttgacaaagttcctgaaccacttcttgtaaataaccttaccttgccggtgtttcggacagaacatgttgtagctgtaacagtctggcccccaatgaccgtcgatacatcccgcgtttagcctccatccatatccgggggtggagatcgataccaactcgaacacaaggggtcagctccgtacaatcctcccgaatggcgggcccgatccacacctacggtccgagttgcctgcttgtggatgaagagccggacctcaccgaatttcaatcgcttcaatcaccaccagaaattcggtcacatttcttctacatctcatcattgccgattgacgatccactggctcccctgcctccacctacaagccatgggaccagcaatgagagagttcctcccacgccattctcggccagggataacatcgccttagaggaagcctggcgtgatctacgggaagcgagaaagactaaatccgcgaaccacagatccaggccaaatacatcgacagggacccccgggatagctgtgcccagtcatgaatcggtctcaaatgtcgaacaccgcaaggcagccagccaagaggatccctcgttggttggcagtagaggaagcactctgagcaaccctcctttcttcccggacgatctgccctcccgcagtcacaagagttccctcacttttgccacaggcagtactggaatgcgaatccatggacttggcaaggagaatcgcgtgggctccgcattgggtgatgagtttaaacacgacactcccagaggaatttccatcgatcagaaaagagtgcgatcgtcttcgatcaatgagttcaatacacccaaaacaagcagctctccattggagactgaaaatgtgggtgaaggcgacgaggtggttggaagtctacaggctgatcgttctcacgatgcaagcatgagtggctctccctttatacgggcgccggtgtctcagcctcagacgccgcttggtcgctcatttgagtcatcttcatcaagagaaggaggcgaatggcaggcggaacttcggcccagtactgctccacgaagtgccccgaaaccttcgggcctgagaacgaccgtcagcctggatcaattgacccaggactcggagagggagatgacagaggagccgaacaaacagtcaaagattccagtcggtgtctcacggcttcatctagtcgagttaccaaatctcaaggtgagtacaatttctacaatttctttactcggctctggcttacagtaacgctttttttatagatgaaacctatctactggagtcctcttcaggacatatcaagtgtggtccgagctacgtggttctacaagaataccatgttgcctgttgagactgaacttgcgaacaaattggaggcaggctacgtttacttgaagccatggagtgacacttggcaagatgaattaaatagttgcgtggaaaatggggccgatgccgagttgaaaattgttcacccgctgtggacaaaacaggatagtcagccttcaactgcacaagtgccacagagtagtgattcgcctctggatgaggcggaggatcccttgagattcgacaataatcgagctgctggtggcacgtctattcaatctgagactatcaagtcataccttacatcaagtgccatctatgtcgatgcaaaaaatgcccaagtacttcggcccagcttacttccctcagtgtcaaggggacgacgacctcttagtgcaataaggaaaggccatcagataggcatacctgtggttcgcggctttagtcgaaaatcatgggaacacctgcacccgtcaaaatccaatcctattgatgtgcgccattacatccgcaagacccagtcgaaaagtccttctgcgcaaggtgaacaaatatgctatgcatgcaagatggaagaatcgcgaccatctccaacagatttggttcttgttatccatggcatcgggcagaagttatcagagaggatggaaagcttccactttactcatgccatcaatgcatttcggcgagaggtgaacatggagctcaacaacgaacctgtttggccgcatgtgcgtcaagatcatgggggaattatggttcttcctgtgaattggcgcacgaacttgtcgttggatgaccccgatgttgagtcaggtatcgaagacccagctagcaacaacttttctcttgcagatatcacaccccagactctgcccgctattcgatccttgatcagcgatgtgatgcttgacattccttactatttgtcgcaccataaaccgaagatggtcaaggcggtgattagagaagcgaaccgtgtgtatcgcctctggtgtaaaaacaacccagggttccaagactccggccgcgtacatctcatcgctcattctctcggaagcgtgatggctgtagacattctcagctatcagccaacacatgttcctcagtttgacttctctaatacggctttacgcagcgacatttttgagttcgatactggacatctcttcctctgcggaagtccagtcggcttctttctgcttctcaataagggtatgttgaaacctacatcattccgccttgtatctaacattatcccagctagccttcttccccgaaaaggcagagacaagccaggtagcgaaggtgacgatctacttcgtggggttgccggcgaagcaggtcaatacggctgtctcgccgtagataatctctacaatatcatgcacacaacggaccgtaagtagattgcacagcctcttcgcttcttatactaaccatctctaccagcaattgcgtaccgagtcaatgcaacagtagactcaggcctttccaactctctcaaaatgggcactatccccagctccaccgccagcttctggcaatcatttggaagcgtctttcgctggaactcgaacccgtcaacattattgccctccacagctcctgcccgccccgcagcagtatccaagctgccatccaatgtcgagctcgagacccacgacttcactcgcgaagagatcgctgaaaaacgcatgcttctgctaaatgacaacggtcaaatcgattattatctctcaggtggtggtggccctttgaatatacagtacctcaacatgctgagtgcgcatagcagttactggaccttgggtgattttgtgcggttcttggttgtggagattgcgagaaagcaggggagagaaggaacgctgcttgcctttcgggctgagaagaagaagggatggaagtattcaaagggttgattcttttttgggcctttaccttcggtttgatttttattttgtgctctggggatagaatatgtaccctaggtgattgtgatattcacatagagacaagcatacatgacttcagatgtcgttccctgtaagcccacaacgtacttgtattttattaaagattgaaacttggttgttgacggtgtattgtctgatcgaaaaaaagatcgaaaagtttcgaagcaggacagaaaggcaagaaatgtgcaaagcttgaggacagacagataagaaacaacacaggcaccaggagatttaagctccgtctgggtgtaaatcatatatcgtatcaggtctctagcaaatgacccgggtgtctgagccatgaacattccccatcaacaaagcctccacgatctcacccttgataccaacgccccgcccagccctcaacaccaccaaggcattcgctttggccaaactgccgaccttcgaagaccgctgtccggcaccctccactcccgtgctcgtcgcgtacagccgtccatccgagcgcgacgccgtaaccacagcgcggtggtactccgtgcgcacgggatcacgcgggaagttatgcgttaggacgacagcaacaagcggaagaccgagctgcggcgcgagccaaggcttagagctgagtgccccggagctgtggcccaggccggtgagtttctgcagcgaagggagaacaaacaggttgagggtgacaagggcggaggctggatttccggggagcgagaagatgagttttgattgacgctcctgttgagaggatgtggcgtcgccgattggtttgaaggggacagttgcgaaggtggttggtttgcccggtttcatggaaacgcggccgaagtggatggtgccgccgagagagcgctcgattgtcggcttgaggaggtcgagctcgcccattgagacgccgccggttgtgattatcacgtcgacgctggaggaggctcggcctacgccgcggagtgagtcgcggagggcatgctcgagctcgctagcaggtgtgtcgcgagcgataccgagatcgacggtttcgaagccccatgagttcagacatgagagaagagatgggcggttagagtcgcggatttggccgcctgtaagagtccgcgggtcattgtgctccaccagctcatcgccggtgctcaaaacgcctacgcgtggtttccggaagactttgacagtcttggtgccggttgatgccagtaagccaatctctcctcccacgggagatactagatccccgcgagcgacgattttggagcctaatgcgacatcgctgccaggctcgcgcacattctcgccgggctcgatatccccggcgaggatttccactgtcgcttcttccttgccgtcaggtgtgcacgagtccaaggtggtatcctcgaccatgactacagcattcgcatttggggggagaggggcgccagttgtaattctagcgatagtccccggttgcaatggctctagattcccgccgacattggcatgggtaatggatgctaccgggaagatacccttcgtggacagttcggcggagcaagagtctggtgcaatgatagcgtagccatcgacgatactagctctataggctgggacagcctctgcggcgtagacgtcttcggcgatcaccgagccaatcaaggatgtggtcactgggacctcaacgacttctggctcaggagtgtgttcattgatccgccgaagcgcttcgtctacagacagcatagggtagggtgaggatcgataacgccggttagggcctgcactagggtcgttggactgcagtctctccgacggcgacgtatgtgcctttggggccttatgcccatgtccatggtcagaaccatggtggtggtgatgatgatgctgatgttgttgttgatgatcactaacgccggcctctgattccagtttcttcacacctccagcatggaggttccgtgaattagccccagcagactggagacaggcatgtggaagaagcttaacaacagcatcgaggttctccatggctcctttgggtgaaccgggtaaggtaataatcaaagtcttattgcggacaccagcaactggtctggccatcatagcaactatgcggaggattagctgaaataaatatagtcaaggagaagcgcaatggcagcgcccctgatgtcatgctcacatggagttactttcaaggaggcagcaatcatgccgtgtctgaagtcttggttagtttactagcgtcaatgcgctggccagggtatctaactcacactagtcccggcgcatggcgttggattagaggagagacggcctagtgatgtcatgagcataagaaaggcaagggtcagaatcagaatcacacacttcgggggtgttgtccttgatggcaaatcctgttcctccgctaaggaggatgaggttgtaccaattagggctatcggcccattcgtatatcgattgctggatctgggacacgtcgtccgggacgatcctgaatgcggggggttcccacttcccctctgcggccaagataggcctaagtgcatcgacgaccttgtcagaagcggggtctttcgaagcagtgtcggagacaatcaggattgcggctttaagtttgttctccatgatatgcgttgtgcataagtctggggaagtggatgtttggcgggggaagttctgttaaatcggggaaaacatcggactccaaagcccgacgtaagttaatgtggttgatttatagtgcaattagtgaaattgatgccactgctgcttttcgtacacgccagaggttagtctcttccaaggttgttcgtgttagatacgaattatcccgaggtccttgaaatccggtttgagtgtacggagtaaccccaatcaattcaacctgattcaacccaattagatccagttagattggacactatagaaagatataaatacagagttgccttttaataaattttgaacaacaggtcgacatgcttccttcagtaagattcaaaagcgaggctaaatatgtctagggataagtgattttatctgatatccatttctacaggtatttgttcatatccctagtgtaacaagctagaactagctcacgcatcctcaaatctgatacatgatctccggatcattgatgcaattcagcaaaaccaaaatggctctacgtggtcgaccccagacgccccaatgcggtgtatatcaaaacatgaacataaactatgaaaacgagaaaaaagaggcgaagcggatcgcctggggcatatgcttcgattcccgatatttgtttgccgccaaaattggaagctcttctctctccaaggaaggctcaatctcaggccgcctccaatatcactgccttttgggccacgagaaggccaacaatcaaaccgaaaagtcccaggactgagctgaaaatctcgatgacgagaatcttgacgaatctagaaaaaagaacaatgtaagtgacggccctaaatatcatatcaacaacaccacgagggtcacttacaggctggggtcggcggcatcggccagggcagcaccacttccattgataccaacggagataccgcaaataagattgcagacgccaactgtgattcctccccagaagaccgcatatccagtgtagtagttgctagaggtgtggattccaccttcggctaccgggctgagctttgaggaaaaaacaatggccatgatgacaccgtagatagcgacgacttcacagaaaatgatggagatcaagttcttggtgcgaatacggggtgctcggacaccaccaccaacaatcgatgagccggtaaggaagatacccctaagaaaatatgcggtcaatatcgggatagttgagcatgccaacggggagcagcttaccatgctgcgccgacaaccgagaagccgatacaagaagcaattccgatatttgcccaagcataaggagaaacttcctcaaggaaacggccgacctaatacgcgtcaggttattaaactttcgaaaaaaaatgggtgatttttgagcgtgaggttccgtacattgaatgcttctccgtctccgtggaagagcatatctagaattcagaccatttcattagctgccagatcgcacttcagatccattgaaacgtacacaatcccaccacgataagagcggtggtggagacaccggccggatagaggtaagccatggcgacctctataagcctgatgacgaatgaattaaaaggtcaggatgatcgcagacgtagagaacgcagccgataaggtagctgaagctctgggatggaagcgggtgatgggggactcggtggccggagcggattaactgctccgttcaggcggtgacttcgcgttgcgcttccccggacgtgttagaacacctgtttccccctgcttttactgttcttccaagggaagacgcctgtcttaaccttctatattctcataaggcttgtttttgtgtctttgacccagtcacaagtccctgacctcattccgcgccactttactacccctgaatttcagtcgcatcaatcactccgtgataatggcgtctacctccggggttgggtcgtattcgaaccccttgaagaagtttaagtaagaactgggacggcattgcaacggtgtggcattataattgcattgctaacggagatatctaggctggtattcctaggcgaacagagtggtaaggatctcatcactttatacttctactacatgcgctctagtcattgggaggggctgacacaagatatctaacgctattgcagtcggcaaaacatcattgatcactcgtttcatgtacgactcgttcgacaacacataccaagcaactattggcattgacttcttgtccaaggtacgccacattataccccgcacaaggattataattcaggcattcctccgagatactatctattcgcaaaaatcagggctaaccatcgtattcagactatgtaccttgaagatcggactgtccgtcttcagctttgggataccgccggccaggagcgattccgctccctgattccttcctacatccgagactcgagcgttgccgtagtggtctacgatatttcgaatgccaaatcgttccaaaacacgcgaaaatggattgatgacgtgcgcggggagcgtggaaacgatgtgattattgtgctcgtgggcaacaagaccgatttgaacgataagcgggaggtcaccaccgcacagggcgaggaagaggcaaagaagaacggattgatgtttatcgagaccagcgcaaaggtcgggcataatgtgaagcagcttttccggagaatcgcccaggctcttcctggaatggaaggcgaggccaaacaaggcgaaagcacaagtacgttcattctcgtgttttatctaccgacttctcatactgaccatgatccctcttccagtgattgacgtcaatatcaatcccaaggagacgaccagcaacgacggctgtgcctgttaagattcccccgcatccattctcccgtccttaagtgccctacctcgatgaacatcgaggctgtccatgatatcctacaattttcgaatatgtacatgtttcttctttctttgcttcctcctcctgtcaatagcgcgtgtctagatctctcagtgccgaatgcggttgtgtccagtttgttttctgatctcgtgggaggagacaaggtgttttgatttccgtttaaccagcatcatacgtttttttttggcagttgaagtttcttcgcttgacttccttttcggggtcttttgattatcgctctggtagcatgggctaacatgtctgatatgtttgatatgctttaattgatgaagctgtataatatggcatttcccttctgggtaacgcaccgcatagccggcgccaatgaaacatgaactccacactattatatatatccaatttgtccacggaatttttattcaaccgatgacgctaagaggcaagtcttgactagttatcaaagacaaaccctttaacatctgtctcacgctccaaattccacattctcttgattaaggagtcgaccttggtcgtatctgtgatcccgccatatttagcaagcgcgtgggtttttacctagaaatgtcatgtcagaatatgattatatatatcttccccttacccaagagtgagctatttcctgaggtatataaacaaacaagccgatttaaaagtacacaacgaaaaggcggtatattgtgtaacgaattatatagtcagactatagcatctcagtaggaagtcaatccatatttgtataaacagttcaaatcgcaggaggactataaccgactaatcaactacctgattaggaacatgtatgccttggtagtaaggcagaaaccgtgggttcaggcatcaatatttcataatgcataaatgcataaaatgatgagtaaagtaagggggcaagccacctatgcatggaaatgtagtcttcactacctccaaggccacatagacgtctatcaagtagaccaaatggataaatccaagatgaccgaatggtacaagccaagaatgagttcattaaatcaccgcacggtgaaaatgtaacgcatccgagcagaaatcgggcaattgatctgcgggcggatcgcccgggaaatggcgcccctgggccatctgcgttgccatacacccagccttttttcctcttcccttgctttgcccgtatatatactcaaccacatttccatcgctatttccatctcgataacgcacattcttggccagaggccctaacacacacactcatggggttcgcttcccgttttctccgcattccgcggccagaggtgagttgagatcgaatcttatcattgccccccggagctaacttatttcgtcatctcaaagtcctttttctatctgatgagcttagagactggtgcttccttgatcacactttcactgctcttgaataaaatcagtggcctatatggcctgctagctcttttgaccggctaccacctgtcccccgtacaactctcaatgtacctttggtccctcattgcccttggactcgcctcacttctgttcccccacattcgcaaacagtcgcctctgcaatgtctcgccctcacctacctttatgtattcgacagcctaattaacgctgcatacactgccgctttcggtgtgacttggttcttggtggtatcgcaacattacgatagtggcaacgccgcgggtccagggggcgagacgatcgcggaaaccgctggcttcaccagccccaagtacgatgcagcatatgttgagatccagaacacaaaggaaggaaataacttcatcgctcatcccccgcggtccgccgaagatttcagcaatgtcgtccttcaacccgagagtctccccagcatcatcttcatctgccttctgtgggtgattagagtctactttgttctggtcatgctcgctttcgcacgccaggccctccgtctctgggttgcggtcccgcgacacacccaactcccgacccacagccgcaacgtttcagtcgccagcgttgccgatatcgatcgggagcctttctccccctacagtcccgacggccagggctgggaaggtaagttgggtcgtgtaatgatcagtatcggccacagctattggctgggtgaagaggaagacggtaactggctcagcggcatcaaccacaagttccgcaaccgttcgggcaatacggagctgcccggcgcgctagaaagagaaagaagacgacgttccggaacgggtccaccaacaccgtcgccatctattgttcgatctactgtccttcaacagccaattgctgagactacacctgctggcatgaatgtgaagatgcaagattggaccgcaccccgataaatgatcttttggcggctattgaacaatattagtcgcaacaatgtacagccctcgcttcgactcggctccatgtcttcaatcccccatcttcctactggctgtgtgcattagatgcaacgaatttgaccgtacccagtcaaagggcacaatccatcttggctcttgtgtctgtcccatcatttgatgaagtcactgaatcggacaaccggccatttgatttcattcgatactccaccatcatgaagcccgagccccttttgctcgatacttacgacaaactgcatatatgaatttggaacgggtccaggtatatggcgatgatcaggccacatgtgtccctgattgatatctgggtccccctgggtctggaaggcgttttcaatctcatgatctcaaaatgagtcttccttggtggcaccactcgcggtcatcaatctgacatgcacgattttggcgtcgggacatggatatgtatattgcttatctaaaatgggggttctgcatatttccccgcgagggtctcatgtgttattttgtacacaattgcttttgcacacctcacacataataataatttcttctggatgacgattcaacagggtgtagtcagtaatactgcaatattcgagtctgtacaattcggaaggctatgaatccttctaatactaaatgagtcttgtagattcagcttttttcctgatagacgtctacaagatatgttgtagacgcactcggccgaattattacaatgaggctgattggctagagccatgataatactcgaccgagatcggtgcagacatttaaccttcggcatttgaccggtagtcttgttctagtagggatttccttcaggtctttggaccatcgagccctagaatagactgaaaggacaggaatatccccaataaaaatgcatttattgggcataggtaattgccgtggtgctattggtacgctaaaagcatgaagaaagatacttaatcgatgctctgggagccaatagcctgataactcgggattagtggacttcacatcatgccataggtcaagcagatcccttgagaatcccggtatctaagtaaattccatgaaatgtcgatgtggttctcgtagatgccaggcaccgcacaagaacctccggccaaatcccggcgctgacgtgctcgacggcatcacgggatcccccgcactgggcccaaataggaaagtttgcatttctgccactgggtgtttgcactgatgtcgtgatcgaagaccaatcagcagattgctgatctaacccccgacgacggagaaattgaacgagcgagggaaagaaaaccactggctcttttttttttttccttgtctagcaagagaattccaagagagctgagagacataatatttaattgtctcctctcatttgttaccatcctcttcggttctgtgctgcgagtgggagatcgctgcatacatactgataaggtatatcgcgattttatcatcccacttgtgctgtgatctcaacagccaatagtcgcaaatatggtgtctatctcaagcgctgctgaagcgggtatgtattttcctattatttctcatccttgaaaaagggagggcaatggctgatcctcatgcaattgtatagtggcaagaatcgcctacctcactagcgataccgttctatccgtgcagccctcattgcagaatgactcattgttctccaaggccctcaaggttctcaaggctaataagacgaccaatctcacgtcaaaagtcaccgaggtgagttgaaaacgtcggggttgccagactggaacccaactaatcctatttccaggttcaagctgtgcgctataatgaagatcccctcctgtctgccttcaccccccttcagaatggcgagactacctccgtcgtcactagctcctcggtcctgattaccgccgtccctcacctttaccgtctcgccaacagccccgtggtcattcacgttgctctggagccctctccgttccccgattactccgtaatcagctccatccgccagtccggtttcacattcctccactcagagaccgtgcaagaggctcaggacatcgctattacagcccacgcgctcgcccacaagtctgggaagggtgttatccacttctttgacccctccaactcggccaaggacccctctattcccgaggaggacgttgaggttgtgaagaaggttctcagcgttggtggaaactctgccatctctgctggaacccagactctttacgccgagtctggtcgtgtggccactgtcactgaagagaccgtaggtacttcacccgctggtctacccgaaccagcgaacttgaccgtgccctctcaacctcaaacccccttcaacgctagcgttgacaactcatcggttggctcctcacggagagacagcagtgctggcagtgaagccccgagctcgaccgcgacgactgtagacagcgccatcgctcggcctgttaacgcggccgatatcttcgagtggacagctcagatttggaacactctattcgaagaggtgggccgcagatacaatgccattgagtacaccggcgctgccgatgccaagtctgctatcttcgtctttggctccaccggagtcttcgtggatgctctcgccagtgccggtgccaacccggagttggagaacattggcctgatcactgcccgcctgtaccgcccctgggttggtggacagatttccaactctatccctagctccattgagaagatcgctgttctcgagcaggttcgcaagaccacccgatggggtccttctttcatggatctattgtccagcctgacaccctctggcgctcgcgctcaggcccctaaaattgtcgggtaccgtctcgggcatattgagccctccactgctgttcaggcccttcgcggtgtcttgcagaacctaaactccgattctcctatccagaatcttgacatcggaagctctcaggttcctgctattcaacctgctctcgagcagcctcgcattgagaatgcttacttgaagatcttgagtcagctctttggagagcgtctccacattgccaaccagcttggatccaacaatgccggtgtttcaagcactattgccgcgagccccgagtttggatttggttcactgctagctcgccaggaccgtcgccaacgcttcatccgggaggttgaggaagccaccaagtccaccgcttttgctactgacgttcccaagacttggttgtctcgctgggctctgaatgtgaaggaagccgccaaggccaacaagcttgctcctgatgtgattagtcgcctctccaacgatggctctgcgatttcccgccaactcctccagtctaagagtctcttctacgaagagtctgactggctgatcggctccgatgcctgggcttacgatttgggtaactccggtgttcatcacgttctcgcatctggcgcgaacgtgaacatgctcatcatcgactctcaacccttctctgagcgcgctgcgtctgacgccactcgccgtaagaaggatattggtctctatgccatgaacagaggtaacgcttacgtcgcctcggtcgctgtttacagctcgtacacccaggttcttcaggccatgtccgaggcccagcagttcaagggtccctcagttgttgttgcctacctgccttacaaccaggagaatgactcggcactcacagtgctgcaggagaccaagaaagccatcgatcttggctactggcccctgtatcgctggaaccccgacaacgaggagaagggtgagccaaagttctcccttgactccgagcgcatcaagcgtgatcttgagcagttcctccgccgggacaaccagcttacccagctcatgaaccgccaacctaagtatgctcctgtgctctctgagtcctatggcaccgaggttcgtgctatgcagaagagaaacgccaaggactcatacgagaagctcttggatggtctgttcggtgctcctctcaccattctctttgcatctgacggtggcaatgctcagaacattgctaaacgtcttggcaaccgtggtcgcgctagaggcttgaagaccatggtcttcgctatggatgagttccctgtcgaggacttgcctaccgaggagaacgttgttttcatcaccagtactgcaggccagggtgaattccctgtgaacggtcgtagtctctgggagcatgttaagaacaccggtgatctcgacctgtccaccatcaactattccgttttcggtcttggtgacacccactactggccgcgcaaggaggacaagatctactacaacaagcctgccaaggaccttgatgatcgcgtcgccttcctaggtggtcgcaagctcactgacattggcctcggtgatgaccaggacccggatgcctaccagaccgggtactccgaatgggagccccgcctgtggaagtctctgggtgtcgataaggtggaaggtcttcccgaggagcctgctccgatcaccaacgaggatattaaggtcggctctaacttccttcgcggcaccatcgctgaggctcttcttgatgagagcactggctccatccccgctagtgaccagcagctgactaagttccacggtacatacatgcaagatgaccgtgatctccgtgatgaacgcaaggctcaaggtcttgagcctgcgtacagcttcatgattcgctgccgtctccctggtggtgttgccacccccaagcagtggcttcagatggatgccatcagtagctcacacggtaacgagaccatgaagctcactaccagacagaccttccagttccacggtgtgatcaagcgcaaccttcgtggcgccatgcgtgccatcaacaactccatgatggacacactcgctgcctgcggtgatgtgaaccgtaacgttatgtgcagttctctccctgagctgtctgacttccaccgcgagacctgggcaatttctgccaagatcagtcagcacctgctcccctcaacctccgcctaccacgagatttggctgaaggatgacaatgacaagaaggttcaggttgctggagatgcgatggttgaccacgaacccctctacggtcctacctaccttccccgcaagttcaagatcactattgccattcctcctcacaacgacactgatgtctacgcccacgacattgggttgattgccatcaagggcgccgatggccacctcgagggcttcaaccttctggctggtggtggtatgggaaccacccacaacaacaccaagacctacccccagaccggtcgcatgttcggatacattcccgccgacaagatccaccttgcctgcgagaagatcatgctcgtgcagcgtgacaacggtgaccgcaagaaccgcaagcacgcccgtatgaagtacaccatcgacgatatgggtgttgacgttttccgaagcgaggtcgaggcgcttctgcccgacgggctcaagttcggcgagccccgccccttcgagttcaagtcaaacgtcgataccttcggctggattaaggacgatactggtctcaaccatttcacgtgtttcattgagaacggtcgtatcgaggatactgctgatttcaagatgcgtactggtctccgtgaacttgctgcgatgggcaagggcgagttccgtcttaccggtaaccagcatctaattatctctcgcatcaccgacgaagacctccccgccgtcaaggagcacatggccaagtacaagcttgacaacactgctttcactggcttgcgtctgtcttcctctgcttgtgttgccttccctacctgcggtctggccatggcagagtctgaacgctatctccccgttctgatcaccaagctcgagtccaccctggaggagtgcggtcttgctcgtgacagcatcgtcatgcgtatgactggttgccccaacggttgtgctcgtccctggctcgccgaggttgcctttgtcggaaaggccttcggtgcatacaacatgtacctgggcggtggctaccacggccagcgcttgaacaagcgctaccgctcttccatcaaggaggatgagatccttgacattatgaagggcctcctcaaacgatactctcttgagcgcgacaccgacggcgagacccccgagcgtttcggtgattggtgtatccgcgccggtatcatcaaggccaccaccgacggacagaacttccacgatggcgtaagtgattccttctatgatatccaccctattgattctaataatctcctacaggttgccgaagatgaggaagaagaagaagagtaactgctgaacacagccgttacacatctaatctccggttttttatgactctcatgggatctaaaatttgctttcttccccttctaattggatattttcacgtctgtatctcacgtcgcaatgcattgatgtcttggcgattgtatgattccatgcaaaaatgttagatttcgtctttttttctcttttattccctttcatgtgcatttcaatgacagctcaagtctgcccgtacatatatactcaaatgatatcatttctctagcacctcttgctatccctctaggccttgaaaaggtggtagaaacccaaccgtggaaacaggccagggggcgttggtaaccacgggaagctgatgcacagctgacatcacctgggcaccccagtgcgtctttgacttcaaaagtttcaatgttgatttcaattgatcatcccttctatcattctttctatcattctttctatcgttacttctatcgttacttctatcgttcctcttattactttcgttaacgaccattccagttgcaatatgcagatcaatatgaaatcgtttttatcagtgatgttcgcgccactgctctatctacgccctcgcttccgtcaagaccaggactggtcatatcgacaagcactagcaaacactttcattaaagtctttctatacatcttcgtggcatttcgcacaaaaccaccactttccctcaagccaggtctagacggagaccgcttcgtcgtaatagagccaggtgcaccagagctctacactaccattgcagtggacaacgagatccagccagtcaccgtgggaggcacatggttcccatcactctaccaatacaacacaacgactacccaagataagtacgtcgtgctccagtttcacggcggctcttacatcctcggcgacggccgcacatcatcttgccagttcctcgccaacagggtgctagagcgcacaccggtaagtcacgtcttcagcctgcagtaccgtctagcctgcaaccccaacggtcgtttcccagcccaactccaagacgccatctccgcctattcatatctactccacaccctgcacatcccggcatctcgcatagttctcagtggcgacagcgcaggcggccacctcgccctcgcactcctgcgttacatcagccactttgacgacgagaaggccctcccaccaccaacatgcacgtggcttttctcgccctggtgcgatattcccgctgcccgcaacgaggatctctggaataatcttcccaatgtgcaaacggactatatcccaccgtcgttccctaaatggggtgcaaagcattttattggtaacctagagatcacgagcgaggtcgagccgtatcttgcgccgctctggcatcccttcatcctgccttcccctgttttgattgtgtccggtggcagggaggttatgtgtcaggaacatgatcggttagcgaggcatttgggtaaaattcagcagaatgaaggtcgagtggagtatttcgtgcaggataatttgccgcacgatgtgcttatggttgcatggattctgaactttcgaaaggaggctgatcagtgtgctgccaaagctgggactttcttgacgagaatgcagtctatgtcagaggaggatgctactcacgttccttctgtggcttttgagtgacgatggtgttcctatgtatgccatggtataccatattgctacctatgtattgctatttgagctaaattatccgattgaatctacctagtagaacgactgcggttcagataaactctctatagattctcctgggttcattgtaaggctctttagtagccttctattatctcagctctatttctcttcgcctattgtcatttgtttggtggaaagaaccaggaaacaccaccttccctaaagtttgacttgtttttcaaagtgcagtggtttgtttgtcaggcgccaggcagtccccagctccttcagatattcacctccccgcattgtcttttcctctctccttctctttcctctcaagattgtgtatccatcgcatcttgcaaccgaggatcttattcttgatactatcgtattcaacccaacgctaatcagcgttgatctcatacaagttcgttgggatatcgattatcgatttccattgcctttttcgacgcgttaacgcgttgaaaacactaggacagacctagataccccgcaaacgcgcacagctttgtcgtcaccgggcagtggtatacccaccgtgtcagctgaaaatggcacccatcccaggaatgactggagagcccgcgcgctttgagaaccagtacgacatagaatggacaggccacggcccgtccactaaaataattacaactgacacgtacactagctacagcaagctcgagaattcccacgggctccagggttggcccctcttgcccgtcttcactgccagcattcttattgcgcttattgttgtgggtatcgtcgcccacgtttgcttctggggaagagacaggtatgtgaagagtagcctattttggattgcggatcgctgatttgagctggtcatgcagccacccgcaagctgcatcttccgaggataagatgaagatggagaacaccaaggaaacccgctccggtatgttgagacattatatctcttgctatgtgctacgctcacgatgtatagatggctggatgtgtttcattctggcctgccatgctgtcattaccctcggtgtggtctaaagaggaacatatacagctgctggagaattgggctgtcagatgaataccccctgttctctggctagctaacaattctccgtggaactgcatttgtcttgtggaactcgaagataagactcctagtctggtgcttgtcgtctcaacgtgatgtaatgatctattcatgagactggatcgaagataagttcgattctttacgaataatatttctttacctaaggaataacaatccactcagcacaaactgagtggagaaaagcatgtactccgtacagtctaaattattatcgacagcagaacatgttagccctatagcatgttaacatgtcaacgggtgtcggtcagctactgcgcaaaatggaaaagaccataacaagtggaaagaaacatgaccgagggatcctgagctatttcccggtaaggtgcaagccctgcacgaacgtcacatactgcagtttctcacgagattgtttggcggcgaggacccagcgagagatgacaacacgctgcgatctgaatacgtactaacatgatggctgttgagatcgatcaagcgacaattagaaaaccgctaggattgaggatatttataaagctacgagaccttgggtgatggatctatgtctcaccaaactagatctaaacaagcctacgtgggtcgaatatttagccaaacaactctattattgacgtgcaaatcctaaagagatctgagagtagtccacggtccagctaattgtatttagatcctgctcaaacccagccatctccgtcagttgacatcgcaccaattcatccaacccgagcatcctgaaccgcgccatgatgtaaggcacatcggatcgcgtgggccacatcattctcacatgggtgagattgcaaccgacatcgaatgatgccggtgcctgcttcttaggtatagaggcgcgaagcccttgcctggttggttggtcattgcgaccgctttcaagtgactgactgggtcacggtgggacgaatacaccaccccgcttctggtggccttgacgtcccttactcattgcgactaccccatccgggggcatttctttgtcgacttccgtatggttggttgccctatactagggaaccgctctcaagtgactgactaggtcacggtgagacgaatacaccaccccgcttcgggcggccttgacgtcccttactcattgcgactaccccatccgggggcatttctttgtcgacttccgtatggttcgttaccttagttaaaaggaacggtgcgtatcttggcacaagcgtgtcagatgccctcaagtcatggtagcgggctgatgtaagtatggacgaacagattgataacaatagacggaaaataggaatatttgagcaggggtgcgtctctcacgctaggaaggcatcaaagaagaattggcgtgttcgatgatgacggaggctagaagagcctcgacgtcaggagagtgcttcatgatgagaggggggatagcatggtggctctctcagcacaactcggtggtacccaagaagaaaaaaagagtaaacaaggggggaaaaacgggatcttgattcaaaccagtacacaagagcggtgagtacataatcctgaaccgataactagctgtattttctgccacatccccgctgaggaatttcgataaaaaaagttatcagtccaagtcgttcattttgcaattgttactggttccctcgttctttcgcgtccattgttcatctaagatatttagtaaccatatcgccatggcttttcctgatgacgatcctgtcgtcgcttcctacgacgtcctcctcaccgactccgatgtttctcgctatgtcttccaatacgttgatcgggaacacgaccgtccctacaatgaccaagaaaatcaacgaccgatccaacttcgacttaagccgcgcactggtcttattgaagttgaagtccccattagtacccgagaaaactacgacgtcaacaagggaatgcgctatggggatgcggtaaagaagagccgttccgcgcgcgacgggggtgcttacggtatggcaggcggctttactgctggtagcgggaccgcagctgcaggagggagagtcaagatggaagcgaatggggatgtggagatattggataataagagggccgtggattctgcatcattgctgcgagtgcagtcacttggaggtcggataaagccttctgaagaaggcgatccagtctacatgctggccaccttcacagatagtacgtttgtcctacctatcactttcttctccggtggcaacatttgattctaacgtctgttcatagaaaacttgcatctctcccccgtcacatcggttgttcaattccaccctcaacttcaccacctggatgctttagatgagatgccaaaagggaaaggctcacgtgctaaaaaggatgacgatgaccgtcctaccgagagcgaagcacgtgcaattgatattaaggtcaaggccgctgaagatagtgaaggagctgcaaacgccggcaacctagacctccttaagcaaatgcaagatgaaaaatggaaaacatacggctgggttgacgccgaggtaagttctctctttgatggacctttctcattcttgtttcatactaactcttaccgatcccaggccgaggattcttggtacacatatgaacgctatatgattcacaaggacaccgaacatctcccatccctagaatcaaacatcgagtcggaagactacctcgataaaatgagtgcccctaggattgatcctacccgccccgacatgactggttgggctatgaaggaaaatcgccggaggcaaagagaaagccgcgcaggtaatgaggccgaatagcgaagagttatattgtacaataatccaatcaaccaatttctagcggaagcttattatcatcctcgcaattatctaaggcttcatgttgcttcaagaaagaacatgggaagccctatactagtagccttgccactcatacttgtccgccaataacgataagacaatgggtatggtcacgtgcctgtttagtttttctgccatctccgtttcatcgcgacaggtccgataaatctccctttctcctgttgccctcgtgttttttacaccttttttcctttctctctttttctcggcttggtcgaggattgtaggacagcgtgccgacgcggtcattctccgtcttctatagcggaacaatcgcactgaacatccatcattgcggtgtcctgtttttctggctgtcatcgttggaaagtctgcatttatcttataatctacgcttaatatctttttctttttgagtcattatattcttattcgctttcaacctccaaccttcgacttccaatcctccaaaaggccaatttcatgcatcatgttatcccgcgtggcttgccaaaaaaatgcctttcttcacttgcggagggctcaagccttccgagcatcgttccatctgccaacaacacgttttcattcatactcgagtaatcggaactcacttttaaatctgtcgtgcaattcgattcacgatcgtccgcgcaatccgtctccgcaatcagaacgttatcttgctacagccgccgagcattctagcatcgatgggcattcacacgagacttacgaccacttcatgcacatgcccttcgagaacttcgatacatcatccctgatcatcctcgactcgacgccacaatcggaatccaaagttttccgcaggaggcatggtgtcggcggtgatgaaatagagatgaaggccaatctagagctctcattgaagattggggagtttgagcgagcctctaagttgattacccgccttggtcattatcatccgcctggctcggatgagtatctcgctatccataaccgtttcatgagacatatggtggcgtatatgatcctcaaccggcagcaggacatggttttgccgttgcaaaaatggtttgaagttgatatgcccgccggtggcgtgacaccggatgcaatcagtttcgcgattatgattcgaatggcgctgcgtatgcttcatggatcgaagcgcgacagaactgttcgtcgatactgggaacttgctcaaaacgcgggtctggaggaagagcttgtcggcattgaggtgcttgaagactctgatgttggtgagctgtctaaggtgagcttacacttctagtctgtactctgatgtcctgctgatgttctccatctagatttgttcctccgacatgctggacttggtttcgaaatatatggatctctccgaagccactgaagtgccttcccctatcgtcgataataccccccaggtgcaagctgccgaccaaaggggactgggactggcatctctcaaacagtccctgtctctcttctccggcaattctgatgtacgtttgccggaaggtttctcaggcaccgaagaggaaggaaaggaattgctttcaaatttgaggcaaacccgactcgaatccgacagtctcgattcggccctctggcgttggcgtacagataatgccgagagacaaaaatccggattcaatgtcgcttccgatgagaaaaagcttaacagaatcatgagcgaatggcacgcggaccttgtgacaagaattaaacaggagttggcgcttgttaaagagacacttgcgaaccgtatcgtaagtatcgagcaaaaagagcgctgtgaatacggtgtgtttttgcaagccctcgatcccgaccggttagctgcactcactcttttgtctgtgatgtctactttcagtcgtcaggggatggataagggagtcaaactttctgcgctcgcttcagtagttggaaaagagttgcaagatgaactcattgccgacacctatctgaagaagagtaagtctatggatccgtgtcgtctaaaggcactgaagcagaccctcgcaaaccgcaaagacaagcaaggccgactgcgatggcgttcgctcgttcaaaaaatcaacgcagaagatgaatctataatctggggctctcgctcacaggtcaaaatcggtgctgttttgatgagcatgttagtcgaagttgcgaaagcctctatttggaccgaggatcctgtcacaaaaaaaagaattctcaatatggcaccagccttcgaccattcctatgagattaacttcgggagacgatccggtcatatccacatgaatactaaactagtggaaattgttgccaaggagccgcccgctgagctgttggctcgccacctccccatggtttgtaagcctaaaccatggacagggccaagaactggcgggtataagatatacgagtccaacctagtgcgcactactcccggtgaactactgcaaccagcgtacctcaaagctgtcttgaaagatgaagggctgaaagagatccgagcaggccttgatgttctcggtggcactgggtggaagatcaatcaacaagtctttgacgtgatgctcgaggcttggaatggcggcgaagctgtggggaagctagctcccttgaatccagacctgcaaacgccagagaaaccaagcccagacgccaactatgaaacccaaagagaatggcaccaaaaggttcgtgaaatcgagaaccttcgctcaggatttcattcggttcggtgtttccaaaacttccagcttgaggtagcgcgagccttccggaaagaggtcttccatctgccccataacatggatttccgcgggagagcttacccactccctccttacctgaatcagatgggggctgataattcaagggggttacttcttttcgctaagggcaaggcgcttggggcatctggcatgcgctggttgaaaattcagattgcaaatttgtttggatttgataaagcgagcatgtcagaacgggagcaattcacaatggacaatctggatgatgttcttgactctgccaacacaggacttcatggacgacggtggtggcttaaggccgaagatccatggcagcttttggcagcgtgttgcgaactccgcaacgccttgcagctttctgagcccacgacatatatctcccatcttccaatccaccaagacggctcttgtaatggacttcaacattatgccgccctgggtggtgatagtgtcggtgcccagcaggtcaatcttgaaccatctgaccgtccttcggacgtctataccggtgtgtgcgaatttgtcaaggaagctattgcacaggacgcagccaacggcgatcacttggctcagcttctcgaaggcagagtgaccagaaagattgtgaagcagacggtcatgactaatgtctacggcgtgacctttttgggagcaacgagacaggttaaaaggcagcttattgactatctccctgatctcagcaacacggagaggaacagcgcgtctttctacatcgcaacaaaaatctttggcgctctcggatccatgttcaacggagcccatgagatccagtattggcttggcgattgtgcccaacgcattacacaatctgtgacaccggagcaaattgaggagctcacgcaagcagcattggtacccatgaatgaacgcgacgagcatttttcgacgtccattgatccagaaaaatctttccggtcaactgtgatttggacgactccactgggtctcccagtggtccagccatatcgcactcgcaagacgcggcgtgttcagactagtttacaagacatcagtctcgttgaccccggcgctgatgatgttgttacaaagcgcaagcagcttcaggccttcccaccgaacttcatccactctctcgatgccacacacatgatcatgtccgccaatgcatgccatgaagcgggcctaactttttccgctgttcatgattcattctggactcatgctgccgatatcgaccagatgaaccttatccttcgagatgccttcgttcgcatgcattccgatgatgttgtcggccgtctcggcgctgagtttagagtgcgatatggcaagaatatgttcctggccagaatcccccgcttcagtgccttgggccgggcgatctttacacaccgctcccgccataagattactaaacttcaagagttgatcaacgaaaaccgacgacaaaatctactcagctcggaagatccagaggatcaggccgagggtcgtgctatggtgacaccctatagtgtctttgaaaacttagggggtaccgactctgacctgactaccttcaaaacgatgggtacgaactcaatcgggtacattccagacgtccttccggatctggaacgtatgccgatagcatgttcaatcgacaccaacgatccggccatcgagagcctggtcggcgacctcgagatgtttgagacgaagcaggcctcacgtgacgagatgtcccaagtagaggatgatgtccatggtgaaccctccgatcagaccgaggaggacggtcaaactgagcagacccagccttctgcgcggcgacgtcagtctcgccacttgaccacgtggttatggatgcctctcaaatttcgtcccgttcccaagaagggcgactgggacctgacccgaattcgtgaaagtgaatacttcttctcatagttttctcatcaccctgggaattaccgcatttccgctggcgtttatgcatacttccacattttgttttagccatttctagagtgctgtggaggagtgacttcgggattcatttagctgacttgtaatttcctgcatcgtttctgcccgattaccttctgggcttcattggttgcatctgtacattacacatgggaagaaaatagtatatactacctgtatgaatatgatattgaacttgaagaactactctaccgttgtctcatcagaaccctatatattacctagtgacccctcaactttaaagcaaataccggagtacatactctcaaagtgaatttaggcaaaattcaaaagaaaagcctaaaaccaacagagagtggccaagcaccgcggatctagccgttttggagcgtcttcagctccctatagcaagtgtacagtgtatactttgccgagctttcgaaagcaaacggtcaagttcgcgtctaaatcatgtactctgcactctatgccgtagaatcccggaacttgtaaatgatccagtctgcacaagaattatatccggagcccgtactttgtacaaatatgcattgttctcccccggtgctaagaccggggttatgtgaccgtagccagatgaggggttcaggtccgaagtattatgcacgtagtctacattttcacgtatctaatatctctagggctacaatacgataaacgttgcttgttgtgccgtatataaccaggatgttggtgtgaaatgtggggaatacggatacatatacagagtacggagtacatacacagaaagcgagcaaagagactttgtagtttcatttgagacaaggcgccttgggagctaaaccggatgaaagctctggatacaagtgtatctgtgtttagatggatatgagagagatatatatacttcctaaaccagtgacaccacgtgctattgccccccgcctttgcatgccaatttccccagattttcggattttctaatcttctgaacctctggacttctggacttctggaattcatatttctggtcttccttttttttgggcggtctacttctaattgtccgacttttttttatctcttagatttgaccttctaaactgtgcgaaagccacgctttgggctgcgccgagggggaaaagaactcccgaggtcgcacgttctctccccgtctttctgcaatgccgttgtgacttctcggtcattctctatactgcatttgactcaatcctttggttctggtagaccagagagtctaggttcccttgatctgtccctctatgtcgccatagccctgcttttgcctcctcggagaagcatgcgatgacctccctctcctccgccaattcttactctcccttttcgtcccaagcaggacggatgacacaatcccaaacccccggactggatacgcttgcggaggggtcgcagtatgcgctggaacagctccagttaacacgtgaagccgataccgctgacatcccaaccgatcccggtcactctcgagactcgaagacttcgcgacattcccagcatcttctctatagcgaacgaaatgtttccaattcagatctcaaggatccagaattgcgcgattcccttgccgaagctcgctctgctattcgcaaaaactcatccgcgaccccagcccgtcgaagaatcagtcgagcctgcgatcagtgcaaccaattgcgaaccaagtgcgatggacataatccctgtgcgcattgtgttggtacgacttttccttcctaccggactctctccatttgcgcattggttgaactaacggttcccagagtttggacttggctgtgagtacgcccgcgagcgcaagaagcgcgggaaagcgtccaaaaaggatatagccgccactgggatcaacgacagtgatatgggtagtaaccaaaacataacgcataccaaagggcaggcctcaaaaggacagtctttgcacgaatccaacgaacattatgaccgcgcctttgatgctgcgcggactctaagtggaggcgcaaattctcggtcgcataacgcggaggtagctggattgtctgccatgcgccaaaatcaagcgctcgtccaagcacctcctcagcagcagatgagttccaacatagcgggcatgccattcaataattatgcagcgctccaagaatctcaccgaccttcgatgtctgtgtcagatatgcgctctatgcagatgatgcaaaactcgaatgggaaccctcggtcgccaggtacagtgcttcattctcaaggattcggttcggtgtataatgatagcacataccctttgatgaatacgcaagatgcgaatccgagctccatgaatcatttccgcattgggaactcgacggacaacccatcggcttctttcattggattctctcctccagcgcagtcacctagctggttgccactcccttctccatcacccgcaaacttcccttccttcagcatgcctcctttctctagctcattgcgatacccagtcttgcaaccagttcttccgcacattatgtctataatccctcaatctctcgcctgtgatcttctcgacatatatttcaccagctcatcgtcctcacatctttctccatcgtcgccctacgtggttggccatgtcttccgcaagcaatcgttcctacaccccacaaagccgcgagcgtgcacccctgggcttctcgccagcatgctgtgggtctcagcacaaacaagtgaggctgcatttctgacatcacctccctcagctcgaggccgagtgtgccaaaagcttctggagttgacgattggcctactccggccacttatccatggtccagccaccggagaagcatctcccaattatccagctaatatggtaattaatggagtggctctcggtggctttggggtatctatggatcaattgggtgctcagagtagtgccactggcgcggtggatgacgtcgctacatatgttcacttagcgactgttgtctctgctagcgaatataaggctgcaagtatgcgatggtggacagctgcctggtctcttgcacgagaattgaaactcggccgcgaattaccgcctaatgcggcgacccgtcaggacggcgaaatggagggcgagggggacattgatgtgaatggcaacaagaggcaaccatcctctctgttaagccacggctcaggtaactctgcgatcaatctcacagaggaagaacgtgaggagcgtcggcggatctggtggttattatttgcgacagatcgccatcttgcactttgttacaacagacccttgacactgctggataaagagtgcgagggattgttacagccgatgaacggtgatatctggcaagcgggtgacttttcatctgtcaactaccgccgtgctggcccaccctccgaatgcactggccatagcatgtttggatattttttacccctgatgtctatcctgggtgagattgtggatctgcaacatgctcgcaataacccgcgcttcggtccacatttccgcaacagcggtgagtgcgaaagtcaggccatggaaatccgcaggcagctcgatgtttacgcccagagcctgaaagaattcgaggctcgatataccagctctattgccctcggcaccggtgaggccgacacagccatggaggcctccaacatcaaccatgtcagcccatctggtcggtctattagcaccgtaggatcgcatgtgagtgagtccatcgttcatacgaagatggtggttgcctatggcacccacattatgcatgtactccacattctgctggctgggaagtgggaccctatcaacctgctcgacgataacgatctctggatttcttctgagtcctttatcaccgccatgggccatgcagtcagctctgctgaggcggccgcggaaattttggaatacgaccccgatctaagcttcatgcccttcttctttggcatatatcttttgcaaggtagcttcttgctacttttgactgccgacaaattgcaaggagatgccagtcccagtgttgttcgggcctgtgaaacaatcgtccgagcgcatgaggcttgcgtcgtgactttgaacactgaatatcaagtaaggtttacccgtgacatagccttagatttacagaagctaatatcctacagcgaacgttccgaaaagtgatgcgatctgcgctagcacaagtccgtggccgtgtcccagaggacttcggcgagcagcagtcccgcagacgcgaggtgctagccctttaccgctggagcggcgatggcagtggtctcgcactttagcaagactgctgaatatctgctgagattctttcggctaccactcgtcttgattttggatctatttccgttttctttgtcaataattttgattttaatttgcgccctgtatactatatttcctggattttggacataccccgaggagcgaaaaggcgcacagtattctgatgtctatatattgactcggcatatactatacctagttgaatattgattttttgtttgattttgggaatctccttcgaagagaacgtattcattttcttttctatactcccaaggggcccatctccttggtaaggcgtctcatttttgccgttcttctgttcgagagtggaatttatgtcatgtgatgaagcttatttcggactccacccaagctacgatcctcctctgctacacctgttcaatctcaaccaccatctatcccaacaaatgaacgtacttgagatcacaaggccaaaaaaatgaaaccctatataggcatacctcttgtgattggacttgtctatcgagcttggtcgcgaaaatctcttaccccgctcggcctggtcgttgcgggatgttcagcctccgctcacgctctccacccatggtcggcaccagtcgcgctccttgcggtattctattttagtgggactaaggttacaaaggtaggaagcgacctgcttctcaatttacataaattatgggcgcagcttacaagatcgtgatgataggtaaaacatgagatcaagtcgcatttgacactctctgcaaccggtgcggaaggtggcgaaggcccccggaaccatatccaagtcctagcgaactctgttgttgctaccatattatcgatcgctcatgcggccatcctggctaaaacagcaggcactgaatcgtgcttctcactcggccagaatgcggctgatatattaattgttgggattgtagcgtacgtcactcaacttcactttctatgcatgcattatctgttctagagcatataactaaccggttcctttttgcagaaactacgccgctgtagccgccgatacactctcctccgagctcggcattctctcgaaatccaaaccccgcctaatcacgtcgttgaatctccgtgaagtccctcccggtacaaatggtggtgttaccgcaactggccttggagctggccttctgggttcgttcattgtttcagcgacatctgctgcggttctcccgttctgtgccagtgccggattgaaggatcgggctctgtggaccatagctatgactctctggggtacgctaggcagcgttcttgacagtgttctcggtggacttttgcaggccagtgttgtcgataaaaggagtgggaaggttgtagagggaagtggtggcaggaaggtgagttcacgattatgtgtccttgaccactctgtgcaaacatctaatctattttctaggttatcattcacccttcgacgggcaagccggttgttactgctgatagcactgccaaaactaccggtagcatacataatgctgcagtgcatggcacccaggtgacacacgtcctcgatgaaagtcacgaaagtcgtcgccttgaaactggtcatgactggctagacaacaatggcgtcaaccttctcatggctgcgactatgagtgtcggggctatgggtattgcacagtggttctgggggttggatgtgtttgagttgctcgtgtaaagtataacagacaatccaggtctcgaacatgcttattacgttcctgtttatgtttcgggttggttaagatcaaaattatgatgaatatatgtctttctctctttgtcttctgaatgtctctgctttgacaagcgtgggccagctttttgtttgtgctagctgcttccaacccaccaccttcccacctttccatttcgatgaactcagccggtatttgttttctttcccttccacttctcttttcctctttctgtgttcccttcgcgtctcaataacaacaccggccttatcaagaaaagccaacgtcaccttgcctcaaccgacacagctcatcacgtgttactgctggccctagttcatgggacccttccatgcatgtaccgagggttcataagctctatctcggatttggaaaactgaaaaccaacaaccttagcgcaaacagagcacgccagccaagatgtctactgaagaagaacgaggagtgcacgtccgagtcacaaagccaattgtctctttcctacccgagaccgaaacatccaagaccatagcatatgaccttcagcacagtgacttgcttcctgtgtatgactacgtctcctgggaatatttgatggccggcgtcgccgttgagaactcgtactgtacacgtcttcttcttcgtttccctgcagatcctgccagattctccggtctcgtcgtcgcggaaccatctcacctatggggtggaacaaccatctggcgtctcattaatcggtggctgatgcgcaatggtgagttatcattcgttatagtttggtgtgttgcccgagctaatactcgaaaggacacgcttggctggaaattgattcgcaagctcccgcggcacttgaccagatcaaaaacgttgatcccgaacgctacaaagacatgcactttatcccttgtcagaccttgaacgagttttccagcagcattccctccttcgataacgcagaagagctgtgggataattacaggatcttcaaggaaagatggtgggccgcaactaggcagtctccggagattcttgttgctgcatctcatgctttgagatctggacagctgggtatcaaggccgagcgcgtcatactaactggtctttcccagactgcagacttgatcagaaagttcatcctcgagtctcttcatctccgacttcctgatggatgtgccccatttgaggggtttatgccatgccaatgtgatgccggcaacccgctcccagacttgcacgatgcaaagatcattgaggttcttggtgagttcgagctaatttacatcaaggcactctacggcggaaagaaagagccttcccatcgtcgtgctgatagcaagtcattccgactctacgaagttgctggtatgtcgcatcgcgagacccgatatctctccatggccgataagaagcgtttgttggctgtggatctggaaggtgcccagtggagcactttcgcgaattctttcatttatcacgcactctttgatgctatggacaaatggattacgaccgatgttgctcccccacgaggtacaacaatagatatggacgaatccggggagattgagcgagaccagtacggaaatgcgcttgctggagtcagaactgttcatacagatgtgtctactgccaaaatcattgatgttacccctcagccacatcctcattggcacactggtaagtttctcacgtccgcgagaatctctttcaattgttctaacttggttataattgacaggcaccgaggtccctttcaaagatgtcaagttgtgggctgtttacaaaacggtagccaactatcggcgtcaggcgggcgaagccatcgagcgacagatcaaagctgggtttctgctgccggaagacgctgaagtcctgcgtcgcgatacgattgagcaagtttccttctaaacttgtcagactacagtacttgtttctcatcatggttctggagtgttatttggatcttggggcctgaagcttcttaggaacacagttgtgcaagccttatgtattatcggggtgcccttgattatgttggatggatttgagaattgtgcgcttctgcaatttcaatgtcttcagctaggccttgaatatctaccttcatgtcaatgtgcttcagttttgctatttaaatagtgataccgttcttcgttggtggagatgatttgcaaacccacatgaagatcccacgagacgcaaagccttgaatcggtttaatttgatctacaacgggctatatgcgagtggtatagagacggtagcaaaccccccttatttgggtcaggaatgggatttatatgagaaaatgtatgagcctaagcgcctaaactccgatttagaatgcacttcaagttctaggtgctgaacagtaatgatttcgctgatccctctgggtagtacaagtttcagcaatatgacatattcactaatacatatgcaatggctgtattccactagcccttggtctacattagcaaaaaagaacatccgataaagataattgaaacaaaatcctctgcagaattacaaaagcccaaccatagtgcccaaccatagtgtagatgttgagtggaacagtctgcagcacgcacctcgtggttagcaaagatgatatctaatctatttcactagaaggcataattacccgacagaaagcgtccactaagcctgtccatgtccaatcccttgctccatcacccccggtgttttgacatatgccggggcaggttgctggaccggggtgtatggcacccattgctgtacagggggtggttggaaggatttctccagttctctttctttcttcttgcgatcacggcgcatcttgatgagaaggataataacaacaacaatgacaatgatgataacgattgggatgagaatcgctttgagcaagagttttagaagacccataatgtaagattgcagtatgcgagtaggtggcagagcctggtataatatgatgtagaaaagatacaacttggatgggtgaatcgaggagacttttataccccgacctgctcacgccctgactctgtgtgactaggccacgtcgtatcaacgagggcatgggcgcaatctacatgagcataaggaatagcgcagcgctaaatggtgatatatggttggcggccagcctatgaatgtgctgaatttgatatggaagcacaagcagactttgttaggctgcatcagacgttgcaactgtgattgatcgtgcatgattgatgtttcagtatattttccaggtcatgccgttatgtctataaatggatttgttcgaactgtgtgactttgaacagcgtaagcaatagttcttgtatacagacaatacagacaataaaccaataattcgagcaaggaaaacaggagattaagcggaactctgctgcctggtccttttctctcggccgatcatccggccacaaattgattacattgctatggatatctacgtgatgctcgactttggtctgctgtttagagatagaaccctttagactaaggacttaataggcagaccttataaccttctccgtcagaatagatagcaagccaagttgattgaattgatcaaaacgattcaattgaaattagtccgttcatctagttacagcgccaagtctcagccctacgaggcgactccactatcgacggcgattcttgcctgtcctgtcactctaaatatagaactgcttctacatattgtacggtttttgagcggcagaaacctagacttatattttgtccgaatgtaatgtatgcaactaggaatcattaattcgtgaccctgcattctagacgaagggggcatcgactgcgtctgggtgcacgtagaatgcaattgcgattatcaaatacctaaatcattagcatcgagggtagccagaacactcatgggggcactcacgttccaactaatagagacccttcgtagtaattggatcgacctccgcgaatcaagcagtccatgacgatcaccgatagaaagaataccacagtttcgaagggactgtagcgcaaagacatgggctgcccaataaccaggccacatatgaccaggaacggactcacaaacaatgcaatctgcaatgtgcttcccacaataacaccaattgcgagatccatattccccttgatcgaagaattgacgacagtattgaattcacccgcgttaccgacaatgggaaccacgatcaggccaataaaagcccggctcacatgccacttgtctacgaagccatcgacgctgtccaccagacgatcggagcagacggtaaccccgagagttgcaaggatcaaaattatgcttgccgaccaggggcccagaactcgctcttcttcctcttctttttgatcgtcgacgaatagctcagcgtgactcttcaattgaaagtagagatagaccaggtagaatgtgagtaggaccacggaggcggcacgggagagactcaggacgctgacttccacttcgtgggacttggacggtatggttgaatagagcacggagggaatgatcaatgttgcagatgaaaccaccatcaaggatgatagtatcccactaacatccacgttgaacctcaccacatcttttgcatagccgccgcagaaaaatgaaacacctaggatctaaatttcgtgtaagcagacaagatcaccgggtagtgaatatgcaccaagacccagacctaccagtagatttcctgacaggatacttcccaccatactggactgcacgatgctgatttctccctgtcggaccgcagtgattcccacctgtgtagcgatcaacgtcagtttcccaccttaacagagaacaaaacgtcgaaacaatccaaccacttacaatcatttcaactgcatttccaaatgtcgcattgatcaaccctccaacggtttgcccgacgctttttgccagttcctctgtggcaaatgacagcaacgcagcgagaggaagaatcgccaggaagttgaacacgaaagaaatcgaatcaccccatccttggccccccgcaatgattcccagaaacacgaatggaagtagcaaattggtgtagctgcatcccagggtagctttaagcacacggaacagagagttgcctaggaaaagagcgcacttcgagacggggtggtttgtgtcacgcaactctgcagattcctccccgtggctttcgcattcagtctcgtctctaagtaatgcatcttgctcatgggctgtcgcgttggcttcaagcggtccggccatgatttcagggtcaatcttggttgactttcgcagtctagggtgagctgtgttgttcatattggcaggagtgaggaaaaagaccaagaaacatcgtggagaataaaagggatggtgtattgctccactgtctctcagccatagacatctgcgtacgggttagtgtaaccttacagataaaaatacatgtatgtttcagttaattacgtttatattacgtatttggctgtatcggtatggaaatattaatgtgatacactgagcctcatttgttgacctgtgtgggctttctcaagacgggtaaattctctcagcttcatcttttccctcgatgaatcatgtctcccaatcgagcttcacctatgctatatttcaattttatcatggcacaggtccatccccacctgcgcctcttgtcacttttgatacctctcatcggtatcatagcaggagccctcaattggaacagtgttgctatcttcaccctcaacatcgtcgctgtgattccgcttggattatgggttaaccgatcagtcgattcgttgactgtaggtggcagccgagttgtcaatgaactgctgaaatcaacactgggaaattcggtggaattgatggtgatatctagccctgggggattcaagcttcaattcaaacatatgctaacgacgattgatccagatcggaattaatgcgatcgcgcaaaaaaaatcacacatctcccaatctgtgatacttggaagtgtcctgagcaatttactgctggtaataaatcccagtatcaaacccaacaactggtgccatgaacctccccctaatacaatctatatctacaggtcctcggtggcaccattttcgtctcaggatacgaccaaaaacgactccgatttgatcgtaccctcacaacaatcctctcatccctcatgatggtcgtcttcatcctcctcgccctcccaaccataatggaggtcttcccatctgccaaagccacccctgcagaccacatactcttaacacaacgcatagcggccattatactcgtcatcctgctcctcacattcctcattttccgcctcggcacccatgcggccatgttcgctagcaccccattcagccagcgagctcaagcccacggcggccggtctcagataatcgaggcccagattccacagccgtatattggcaaggcttcagcatctatgattctagcagctgcatccgcgtccgcgcttgcgtgcacatattacatagtaggttgtttgggtggggttgcttcaatcacgggtatgaatcagtctttccttgccgtgacagttgttccactggtcggaaactcggttaagtaccgccgcattgtgatggggtcccggacttacaatcagatcgagcttggaatcagggcggttgttaacaatgtgttgcgggttacgatgcttattgctccgctactggttctcgttggttggggttttgaccagccgcttattctgagatttgatgggtttgaggctacaatgcttttgcttagtgttgtggtgatgacctatcttatttctgatgggcggagcaattacttcgaggggttgatgttgattggaacgtgagtcgctcgcactactttgatggactttgattcgtcggtattaactttactttctcttgatagatacatgattatcacgttctcgttctttgttaggcctgaggtgccggcgaatgtgatttacctaggtggttagcctggtatatcacacatgagtcgttacttgaagtggctgctggatgcggcaaatcccttgagccatctagtgtgcatagaacgccacaaccaaacttgaatagctataatcatacatcaataaaagtacttttaaaaatcagtaaggagtctagagaaacttacagggcaatcagcatcgcaccatggatgtaagcgtactgtccatcacgaagtagatgattaaccaccagaatggccaaaaacatggtcacggtctggaatgagtcgaagaaaagcgtcatcggttcagcaatgcaccagccaataaccaccaagaatggtatgacaaatagaccaatctgcaagagactgtcgatgataacgcggattgcagaatctgtatctcctgtgcgagatgccgcaatgacagtaaccccctcggtgctattgctagcgattggaataaagacaattgctatgaaaacttcagagactccaagcgtctttgccatgtcgtcaacactttcaagcaggagttctgtgcaaaagactgttgcggccacggctgttgtcaatcggataattgatgaagctaagctggctttgttggctgcggatgatgaaactacgttattttcatcgtcactagcttcgctctcaattgaaaggaagagatgcttgtgagtgccgaggtagaagtaaaggtaacctccgtagagcgcgaggagtaccaatgatgttcctcgtgagaaggatagtactctgtcatcgatctcagatactgggaaagtcgaatacagagccgttggaagaagcatcgtgacggctgtgatcatcatcaaagaagacaaagtctttgcaagagcgctgttaaactccaaaacctccttgttgtacgaagctgtgacgaggcagcaaccgaatacctagattgagctgtcagtccggatgatatggccaacactgggactttcataatgtgaggacttacaagcaaaatatccgagagaatactgccaaccatcacagactgtgcaaatgggatctcgtcatgaatcagagctagaattcccgcctgggctgagtgagcattttgtcatttcgatattcagggcaatattgttactcaccgtgagctctaccgtatttccgagtgtggcactgagtagtgcaccttgcagctctccaagatgcgcagtgagttcatctgatgaggtggatatcgcctcggacaagaagataatggcgaggatattcaccgtgaggactatgatcgggttccagtgaaatatctttgcaagcccagccagaggtagcagcaccattgctggccgtccatgattgatgctcagttccttcagtccattttgcgatggcatcttgaagaacctctggatgtgaatccaagggtcctggcgatggtggctaggcgctggctgagtgtctcggcgagataccatggtaaatcttggatctcttggattgttgaagcttaagtgagatgcgacccgcggactgggaaatcacatgaactggatatttccaagattgtgttccgaacgttaccacggtacaagtacgggtactagtaactttcagccttatcaaagttacagccctattactagcgccaaacggaacggtctccaccaggaagtgggcgatagggctgagccggtatttagccgctggatacttttcaatagctctgtatacaacttacagtatccaggcaacagcatttatttgatcttcgtctcagccttatgggatgttctgacgtgttaggctataaatactcgaaagatcatgtgcaatgacgtttaattacagggaaggggaacacaagtcttcgttgacccctctctgctgtgtattgtaattaatcggaacattcggggccccccacaccttggcaatgcgttcgcagctcacaattcttatcttcctctcaaagagtcgtcacgctcaacccatctagtgacaacccaacctccgacccgagtaaatgattaagagccagcctaccggatcattcacaccaaaacaacaaaacaacaaccggggccaggctggataatccttgctgtccgtgatctatggataatcatcctccctccctcgagtcgctccagagggaggttagtgaactcacagccatatatcatggccgaggctggacgaccgaagcaacagaactagagtcagcaatgaccacagcggggaaccggatactcgcgacacgtgcggattctgaagggatgaaaataatgctcgaagagctagccgcatgtgtcaagacattgctgcaggccaattcatggattgttgccgaagatctaggcattctggtgctggactcatgcgagaaacttaagggagagcaagacttaatgactatgacagcgatgcataatcttgcttcggcgtattggggccgaggccagctggatcaggctgctgctctcgcttcctgggtgaccaagttgagacagaagattcttggagaggagcatccccagacgttgacttccatgaccaatctagcttccacctatcggagccaaggcctctgggccgatgctcaagaacttgatttgagagtttttgagatgaagaagaagactatcggtctcaaacattcatccactttaggctcaatgtctaacctggcaatatcgtatgcctatctcggtcggtatgaagaggccgagacaattgcacgccaattggtcgatctcggagaaagtgaattatctccaaccgatgcctcgttgttaaaatggaaacttaccctggcatcgacctaccgagaccaggggaggttagactccgctgaaaagcttgaattggagattgtcgctgttagtcgggacatatttgggacgaatgatcactttaccttgacctctatggccaaccttgcatccacataccgcgaacaaggtcgatggtcggatgctgagcgcctggaaaaagaagtcgtggctagcagcgagaccgtgctcggcgaaacgcacccgcagaccctgatgtccattagcaaccttgcctcaacataccgcaatcagggtcggcttgaagaagccaaagacctcggggagaaagcaacgactgtaatgaaagaggtcctcggggaacgtcatccacacacactggttgctatggcggatcttgcagtgacattccaaatgatgaggcaatcaccagatgccgagatcctggcagcccggtcattacgtttgatgaaagagacgataggcaaagaccacccgtatacactcaacgcgatggccaatctgggcttcatataccagtcgcaaagcaagtgggacgtcgccggtggaatggccgaaactgtatattctcgcagggaaagagcattgggaacggaccacccagataccgtggcagcgctagaggatttgaggagaatagcgtgggtagaggcggcggatcagaattcacagcgtacgttgaattagactctcttttaggcttggactgtggagaggtgtcgactgtccccagcgccattagtctgtatctagctagtgtcagccaggtttggcgatttttaatcattttttctgggctcagtgaccaattgtcaagtcttgttgtctgccagtcagccagcctcgggcatttacatagcctccttgccaagacttgagactgtcaacaatcttcttgtgtgatctctggggctttgttttgggggagtacaataagcaacacagccctgtaagaaattcacttgcctgctctggggtggactttggttaattgtatggctaacgagttcagagcgcttgtccaacataggcatgactagttgagtcagaagaactaaaaaggaagacttcatattgatgacctataacgcacaaaataacatcaaaggaaggtaacgtgtcttccagatgtcgctgtaccggctccgatacatatctcttgcagaaataggtggatatcatgttatgatactgatatcttgtctcttggtatgcatgatacgccaactgtattttacaatccctttttacgtatttgtatttcgccagacaggtgcacctcctttctgattttgtccatctgatcctcccatgacattatccttgacatgacgccaatttcgggagccaggaggccttatatgtctcttttttggtcgcgaatagtaagttcaacgatgagcctgagaatgtgtcttactgacgatacccagaacccgcgatcaaaacgtgccacgaaacaattcactcaatcgttctcgacctttcccctggatcctgacacattaggcaatcttgtgttgtccaaagatgtccaagagttccatgctattggtggcgtaacaggcttggaggaaggactacgaaccgacgtccactccggtctgagcctggacgagacctacctaggtgctcccgcgaacatcgctgcgagtactataagcactgcgccgacagaaaagaccgctatctctgagcttcctatgtcgataaatcttcatcgcgacgcattcgtcgacagaaggaaattcttcggcgacaatcgcctacccataaaaccatccccgagctttctgtcattgatgtgggcagcctacaacgatcacgtcctattcctcctaaccggggctgctattatctcgcttgctttggggctgtatcagacattcggaaccaagcatactcccgacaacccgcccgttgaatgggtggagggggttgccatccttgtcgctatcgtcgtcattactctcgccggtgccgcgaacgactatcaaaaagagtgcaagtttcggaagctcaatagaaaacagcaagatcgcaatgtttgggttcttcgatctgcaaggattcatgaggttcccatctccgatgttgttgttggtgatattgttcacatcagtcctggggatatcgtacctgctgatggagtattaatacgaggtcatcaggtcaaatgcgatgagtcctcggcaactggcgagtctgatccggtcgataagacccccatagatacccgtcctggtggctctcgtgagatcgaccccttcatcctctctcataccaagatcgtggaaggcgttggtgcgtacctcgtcttggctacaggcacaaaatcaagctacggaagaatccttctctctctcgataccgacccaggcttcaccccgcttcaagtgcggctcagcaatcttgcaaagaatattgcccactttggtgcacttgcggcgcttgtgctgttcgtaatcttgttcatcaagttctgtgtcggccttcggaatagcaccgagtctgcctcggaaaaaggacaatctttcttgaatgtcttcattctggccttgaccgtcgttgtgatcgcagtccccgaaggacttcccttggcagttacactcgccttgtcatttgccactactcgaatgatgagagatcacaacttggttcgacaactccgagcatgcgaaacgatgggacaagccacggatatctgttcagataaaacgggaacgttaacacagaatcaaatgactgttgtctcgggtttcttcggtgttacctcgcaatttactgatcgagttagcagtccagacattttagatgaagaaagtaccttgtctgtggcaaaatgcatgaaccatctctcgagtcaatcgagatcgcttttgaggcaatctatcgcgattaactcgactgcaattgaaagccgatatggcggaggtcggcagtttcttggttcccaaacagaggccgccttattgagattctcccaggactatcttgagctaggtcagcttgaatttgatcgcgcgagtgaggaggttgtggatgttttaccttttgatgcttctcgcaaatacatgatcacagttgtgaaaatggccaacggggtatatcgatcatatgtgaaaggtgctcccgagattctcattgagaaatgtgtggccacgattgcacagccaatgcaagggcttagtactgctccaatcacggagtatggtattgaacaaatacgccagacaattgctcagtatgcgtcacgatctttgcgcacgattgcgatttgtttccgtgatgtagaggagttaccttccagagacgaggaagaaactgtcagcttcgaggatctgatgaaagagttcacatttctaggaattctgggtctacgagaccctctccgagccgatgcttggagtgctgtcgacaccagtcataaagcaggtctcactgtacgcatggttaccggtgacaaccttctaacagcaagggccatcgcagaagaatgtggaatcatcaatagtcctgatgatcttgtgatggaaggcgataagttccgtgcgctagatgaatcacagcagaaggagctagttccacggctcaaggttcttgctcggtctcgtccagacgataagcgggttctagtccaacgcctgaaggatctcgggagagtcgttgctgtcactggagacggtaccaatgatgcccctgcccttgcagttgctgatatcggattctcgatgggaatatctggcactgaaattgctcgtgaggcttcttctattgtcctgatggatgatacattttcttcgattgtcaaggctatcatgtggggaagagcagtcagcgatgcggtcaagaaatttttgcaggtaagctactctatcaacaaggagtatggatggccatcggtctaatatccattttccagttccaaattaccattaccttcacctctgtgggcctggcatttgtctcggcagtagccaactcatcgcaggagtcggttttgacgccagtgcagctcatgtgggtaaacctttttcaagacactctagcagctctggccctggcaaccgatcctcctcctcgccggatccttgaccgcaaacccgaaccaacatctacgccgttaattactcctaccatgtggaagatgattattggccaatctgtgtatcagatggtagtaacactcgttctatactttgcgggctcttctatcttctcttatcacggtgcttttcaaacatcacaattgcagactgctgttttcaacacctatgtctggatgcagatattcaacatgtacaagtatgtcgatgctaccttcaatatttttgcgttactaaccccaatacagcaatcgacaaattgagcgatcatttaatctcatcgaaggtatccatcataactggctctttatagcaatcacctgcatcatgatgggcgctcagatcctaattatgtttgttggcgggcgggcattctcaattacaaagttgactggcgatcaatgggcatattctatcattctcggcgcaatatctattccagtcggattccttctgcaggttattcctaccgtgattgttgaaaaaccaatgacaggcatgaggatgctatgggacggcttgcggcgtcggtgatttccctttctctctttctttcttgatcattcacgcgagcgtctttgaatcttgcatggccatccagacggaatagccgtaaactgactcttgaatacccattcctttctaggatccacttgctcaatatcgtagtcccttattagagttgccattagtttgagtagctcaaattgggcaagattgcggccggggcattggttgtacccagctccccactaatagatattttagttcatttcgtaaatgggtgttggcgttatcaattgcctacgtggattaaaaacgagtcgatataagtcgtctctgcttgaagccagcgatctgggttgaagctgttgcagtcctcgccgaagatctgggggttgcgatgaaagacccacgtgttgatactgagaaccacctatagatagagtcagtattcaatcaaatatcaatcagtgtaggtaaagtaaagcctatgaagttatccttactccttggggaaaatatctgccagcaatagtcatcccaccttgtggcacgactcggggaagtccaccaacggcagcagagtggaaacggtacgtctctttcagctattcagagatataagcggagataattgaagtcgactgcttgcaagtggctacttacacaggcctgaagaaatggcaacctctgcgcttcattatactgcacgataggcgagagttcaccccgactctgggcagcatcaatctcatcgcgtaagcgctgcaaatattctggatgacggagtaggtaataaataaacgcctgggctgtggcaccaacagtatcggccccggccccgatattcgcaacagccgcggcaaagatctcattctcagtcatgcgatcgggatatttggcccgaacgtccagccagcgctgcatcatatcattccttgttgcggggttattcttgcgcgcatcgatagcagcaagacaagtgtcgaaaatatgcgatgaaggctggagtccaatgcggctcagaagcgggtttcccagtgtcaggttgtgtagccagatatagtggcccatgaccgcgatgtagactgccagggctttggtgtttgcgaccgcatctctgatatctgtgcctgtttctacgaatccaaaggattttgagaaggttacttcgcccagcacgtcaaaagcgaagaagctgaaccatttgtcaaattctactacctcgttgcatttgcttaatctgtcgaggtgcttttcgaagcagtggaggattgcgtccacgtgtggctcggacttgataatgtttgatagtgcaaagccggcggctatgttgcgcgacttttcaatatgccgctttggattcaattcagacatctggttcacgtaatggtagtctggaagactgaaaattgagtaccacgagcccttttgtgcatggttgttaatattgagtacttttgcttttgcgattgtcaagagaaatacatactttggctatatttgcatggagaagctgctttactgcgtctgggtgagagacactgacttcattctctgcaatgcgaacaaaataccctgtcgctcttgttaaaatatgaaatagaatcatgacagaccagcctaccattcttttggtgaaggtcaataagctcatcttcgatatggcccttccacaaatgataaacctgccatagtgtcgaaaaagaagccaaaaatgggcctggtatatctctgatcggggtccaatatttgcgagtgatcgctcgcacagtaaacaaaatgactgctaaaacccacagcttggacaaggtgatcaaggccgttaccccagacacaagtaaagaaaccatttcaattgacagtatctgatatacacgttccacacgtaggggatgaagttttatttccggggagattgttgggaatcattttaattaaacgtgcttttgacatgggtcggtcataacaaaagtccgttgctcatagcttcccctgagaacacaatccagtattctctgccgtctagtatcaacctaagctggaatagtgaaagtagaatgttttggcgttggccgtgcctagtccttgtggggccggccttgctagcggcgttgaggtggactcggaggaaggctgctagcacatatcggggatagtcctactatctcacgatggtctgatttgctgattaaatattgtgccgcgggggtcgcgggccggagatgagagtagaatccctccttgtttggcgagaatccttagacaagttggttgcagggtagttgaattgggggccaaagtctgccttgatgaatctattcacctcggtttcgtgttttaggaatgggatcaattcttcaaatattctcttgggcacgatgtcctcttctaaatacccatcgtcctttctggcggagaatcgccgccagccggcgattatcggcatggtcgttgtgacaacactctcattacttgtcgttctgattcgcctgtacgctcgggggcatctaatccatgagctgggatgggatgacctcacgattgcagtcgcacaggtaaatttgatccgatcactcgcgacctgttgcgggattttgatgtctatctagttagtcagctggatagtcctggggctttcattaatggtcatccactatggctctggccagcatctcgcagcgttgatgaacgacccagaagccctagtgcatatgtataagtggcttgtcggagctcagctcgtgtatatgttcaacatgtggctgtgccgcatctctggcatcgctttttatgctcgtctcaatcaaatgccacgattcaccctttatctgcgtatttccttcgcttttgtgacggctgtgtatgtagcgcagacactcatcattactttgcagtgtgttcctctcgctgttctgtggggcggcgcagagggtgaatgcatgggctcagagattgttttcatttcgacttctgtactcactatcgtctgtgactcgcttgtgctgctattgccaatgaatattgtcttctcgttgaaggcaaagctagcaagaaagctagtcttagcacttgtactttgcgtgggagttttgtaagttctcttgtccttgtcttcgtcaacagtgagaaagggaagtagctaatatctgtctctttagtgctgttgtgtaagtcttcgccgccttcccagtcacggtctattagctcaccgattataggacgtctattctccggatggtgtccatgatcgtcgccctccaacacccggatgatgcaacttggtatttctctgtggtgatggtgtggtctgccacagaaatcagtgccgctatcatcgctctttctctcccggcgttgcgggcatttttcggggtcttgagcagaaatcgttcgacgatgcatcacagtgactcagataatatagggacaataggccttgagtcgattcctctatcggcaagggagcctgtatctgacggacatgatgttcatgagacgacaatcgatgtggactgggggacgagtccgagtcaggagacgctttggggtgtcaaggatggagaatatggttcgcatgggcgttgagaggccccaccccggtagacgagcatagtggagtacctttgctccgtgtttactccatacctagttaatggtcaatccaaagaaaaattgtttccatgtggctgaattcatttgaagcgatgtcttggcattgtttccgcccattctttgatgatctggtgctgttgggtctgcccacttcttctgttgaggccaagaagttttgtatgggtcacttgcgaatgctttctgaacacatggctgtgttcctctcggtgaggcagcgtggcgaaaggcattgctgaggtcggccagctgatgtatccatttggagaactagattgaggcacaccacatcatacgagcgtcagagagcaactgccaagagaactatccctgcctagacagaaatgaggtagcttagacctgaaaagcttcctcggggatagattaatgcaattgattcgttctttcggcaaacctgatggtcatgcgagttaggctcaattgaccatatcggagaattgaacagatacgaacgcctttaaagagtggagcctatcattcgagaaatccctgcatgaccgtggagttatcgtatattactaatatcagacttccaaggtttagttctgtagttcgtggcagtgattacatgatgtacattgcacgtggggcaaatcgacctgttgcacatgagtttggctgtcttggctggcaaaaactctgaaaccaaccgcactaggagctcttccaacactttccaatcctccagggttcctctttcgtcaattagagtcacatcctacaaagtacgaaggcacgtgcgctcgcctcggagctcccgatgtagggcaaggcggtggtcgtcagctcggcacccgatgtcttctagaacaaacatgaaccatgcgacagacacattccgggggattggacctcttatacacccacgtgtgggattgcagtgctctcataggtagatgcggaccgtgcgcccccacccccgccaagagccgcaaccgtccaatggccgtgtcctggaaccaatcaggggccgtctccaccgagttctaaaccaatctacacctaatctggctccttttcgtcgcatgtcaatgtaaaactacttccgccgagatattgccaagacattgtccaatttgcttcagaccataagcttgcggaaaacgggctttcttcttcttggcttggtcgcgttgcatttactttttgccaaggccacagacgatgattgctaggctcccattgcagcacgtgtggccggagtgtcccaatcgggaagttctcctgggcagaggacgttcgccacaaagccttgtcttgcatagagagtagagcggttgtgtcttatcttcccatgcatacataaagggcagccttttcgcccaggtcttggtttctcttgtttctcagatcaaaagtccgtccagtactaagctttgaatcgaaagcttgacttgatacaactcatcaagatgtatctccatcaatacgattacatctttgccatcggcacgttgtttgctatgcttgatgcattcaacaacggtgcaagtaagtagcagcctatccttggatggttgacctcgaactaaccattggatgtctatagacgatgttgccaattcttgggccacgagtgtctcctcccggtccatctcctaccgccaggctatggtcctcggtaccatcttcgagtttgtcggagctgtcgctgtcggtgcccgtaccgctgatactatcaagaacggcatcatccccaactcggccttcaagggcaatgccggtgttcaaatgctcgccttcacatgtgcccttgccgctgcatcctcatgggtgatgtggtgtaccaagcactccgcccacgtctcctccacctactccctcatctctgctgtcgccggtgtcggtgttgcaactgttggcgcttcccaggtccagtggggctggaacgatggcaagggtctcggtgccatcttcgctggtctcggcatggctcctgtcatttccggttgctttggcgctattatcttcatgctgatcaagtacgtcgtgcatgtgcggagaaaccctatcccctgggccgtgtggagtgctcctttcttcttcctggttgctgccaccatttgcacgctctccattgtttacaagggctctcccagcctgggtctgagcaagaagcccgcctggtacgttgccgccgtcactatgggcactggtggtggtgtctgccttttgtctgctttcttctttgttcctttcattcactcccgcgtgatcaagaaggaccctagtgtgaagtggtggatggtcatccagggccctctgctcttcacccgtcccgtccctaacggtgctgaagttgccaaggttcccaactacgccgtggtgcaagaggaacccgaggagcacgagtctcacctgcctatcgatgagaaggatcccaagaccggtgtttcctccatcccaggctccacggaggagcgatccattgaaaagctcgaggccaatcagctcacctaccgcgaagtcatggcccaatccgaagagcgtcacaaggccaagctcctccagagccgtggtcctattggctgggctatgcgccttctccgcgacaaccccatgggcgctggtgagatttacgaactccgcaacctgaagtgcatggccaagcgcatccccgccatcatcactgtcggtcttctctatggtttctactacgacatccacactgcccagagtggtaacgagggtactccggagggtgagcgtatgaagcgtgtctatgccaacgccgagaaataccccaatgaggtcgaacacaccttctccttcatccagatcatcactgcttgcactgcttccttcgctcacggcgccaacgatatcggtaactctgtcggcccctgggctgccatctactctgcctggtccagcggtactcctgccgcgtccaagtcccccgtgcctgtctggcagcttgctgttctagccatttgcatttccatcggtctttgcacttatggatataacatcatgaaaggtaagcacctcttccttccacattccaatcttcatttttactaactttaaacttagtcatgggtaacaagatcacctaccactccccgtcccgtggctcctccatggagatgggcgctgccatcacggtgctggtcttctcgcagtactccctgcccgtttccacttctatgtgcatcactggcgctaccgtcggtgttggactatgcaacggaacttacaaggccgtcaactggcagcgtgtcttccttttgttgttcgcatggatcatgaccatccccatcgctggtacccttggcggatgcttgatgggattggtcctcaacgctccccatttccttgtttagacaattggctttttggtccaatcgtgaatattttcgagaacgcacatattttacttaattcttcttttgaaataccactttttagagcactcggacaagaagatttaccagaagagtcaaactatttttggaatagaaaagctttcaattgaaataaatgataatgacttctacctaacctcttcacttttcaccattaggataaaaatagaaatgagagcgagtggcttgcctctgagttttaattgaaaaaagacaaaaaatagtttccctgggaatcgaacccagaacctttccggaacatatgctagtcgcatttgttaacggaaaatcataaccgctagaccaggaaactgctcggccacttgggccaattgatgaatggacaggccattattggcctcatgagtctacaactttgttcccaattatttaggtccggagtaacagaacgaacttgtttcgccaaccttccaacattcgaaagtgggcaatactcaatccacagcggcgagactctcaatggttcttaatacaatggaagttacatccatctttggttttatgactgactcttcatttgatttatctcatctccgacaacttagggtttccaagggatattcttttgttagtttgatgttaattgtacgaattcttcaatatttcattaagaataactaatttattcaacaccatgatacctaaatcgaacgagaaaagaagaaaaaaacttgaacaacacagatacatatcttctcaaacgcagttgcatatcctggctccgtgatatgcgattctcaaacaatccccatctcttcagcgaccttggccaactcatgtctttctctgcacaagtactcgtaagtgacaatcttattgcgagcatcctcttcgatggatttccattcctcgggagaaatggtaatttcgccatgttgctttggaaaaatggtcattgggcggcagcgttttgctaggccgaccttgaaaaacccgagccggaactgggtctgctttgtcggttcgtgaggaactccaaatacaaatggttctttcggacgcttgtagggttctccgttgactactgacgtaaggcccatctggaaacattcttgtctgaaccggtcccgagccgatcccggcttgggcatttcgtacgcagctcgatcactgggaaccttggttgggactgcgggagctgtgcccgggatcgggagctctgatggctgggtttcagctggggcgtccggagagtctgctgcgtgttcatctgtgttgtcacccgtggtgtcatctgtgaagtctctagagcctctgccaagatcgtcgtcggattcatcctcggtgtcggtatcggtgtcatctccagaattggtgtcggtgtcatccgaagaatcgccccaagactcgtacccaagctcttctgcaaggaccattccgaggacctgatcttgggaagatttctcgttatccaacacttgctgcagaagctccttgtccaccttccagtgaatcggcatcttacaccagggcttcctgattttgccaagtggacgttgcctaaccaaaggtagctgtagtttgacgagagcccccttccaagttctcaacggtcgtttgcgtttgtcttcggtcgagacagagctgttcgcagtcttgtcgaatttcgcgtgtgccgctatagccttatcatgagcacgttgtctctcagcccgggtctgctcatcaattccatgcctggtgacatccaggaagaagctcaggtcctggcattcgacgccctccttcgggtccatggcacaagggttcgctttcacgaagtgctcatgagccttgcgcatgtttccgcgcagaaactcgacccgacccatccagaactcacacctggcaatgaggagggaattttcggatttgtttgcggattgcctggcgagcttgaccatcacctcggcctcagaggggtcttcatggatgatgaagttcgaagctggcaagagataagagccgacctcgacccgatagtacatatgtaacaaatcgttgttagtcagattgctggaattgctgttgattttttttgcaagaaccctgagcctgtttgtttcttctcgtatagcgcgggcttccagtgtgaggtcttgctctccccgagaatcgagtggtgtggtctgccgggagctcccatcatttctcgtgtggggtatgttgtgggacatggtcgaagtactatcttgccccaatagggtcctggattaatcttggtaaattgtgaagtaaatttgatgggattgccgtttgtcttgcgaagatccaaaaattcgcgtcagatagaagagatacgatagaagaaaatattggtagttcgttggtgaaggaaaatagcaaccgagaagagaagcagtggccttatgtacctcacaggcgtgttgaaaagaaagaaaacaaacgcgttgaaaatggtccgacctagacagttacaaacaaaggcatttgtttacaaggagactttggtgtcctttcctttgtttctatcaatcccattgttgatcgcgctggaaccaagacgccacattctatcatacccttcactttgtgtatattttggcttgatatgtacaagttaagtaataaataaatatcattttcatggctgtttatgtagcactaagtattctccaccctatactagaggtgctgtactggttcagtcaatatatacacactggatacaactatgacagttactttaatggggttggcaaataatatagataaatttaacctactacaatttactcgaaacggaaatacaaactgtggagttttggtttattggatttctttctcaagcaatattcatcagtttgaagacatcacaacgagatattcctataaggaatgatcattattttgtcacctattcaaggataatcaacccagattcgtctcgaagggccaatcccgaagttaaagaatgagtgacccctcaagtagcccacttttcaacccgattcacaatctatatctggacactggccgaactgcttattgcaagagtcatgtatcaatgaatgaactggaggaaataccaaagtagccacatcaggccaataaacagtgcttttgaagtcggctgtattttcaacgttgtttaccatcctcccaatctaataatgcgtgggtagacgctgccggtgagtgatcaaactcagcagcctctattcgagtaaacccaatgacagcctccctttgaatctcacgggccttttcgctatagcctggtattacttgtgcccgcgaaagcgacagataagcatccgggaatctatgaagtttcatgaggttcattcctttgataaaatgagtaatgcaggcgataattcgagattctgggttgttcaagacggcataacaattgttcatttgcacaaccatctctaggctcatcgtggattctttgaattggcaaagatggtgttggacagcagcaatgaaaagtcgacatcgcatctcatcaagttcgcataaaaaagggttatctctgatgacctgcgaggcaagctccattgcaagctctgggtcatcatgtcgccaccgctcttctgcatctaccagtaatgagccactgtaggagcagagccagatatcatccatagatgtacgcgttattcctgtgggcgaaattgttctaggaatgtcagacagagactgggaatcagattgaagaggaggaacagcgagagtggggttacttgaggtggtgtgtgccagcatgaaatcggactctatgagccgcaactgaagatcgtatactgcatcgaaggctcgacacaattcttgttctagttcggcaagttgggaacgtcgggaacgtcgggactggaagcgcttgcgcaaacgtcggaagatattagccattttggagtggaaacgtcttttgatgctctcaagctgatgaatactttgagataattctttcggggtttatatacttgtccatcgagcagtttccgggatggcttctagaggacaaccgcccatactgatgaaagagatcattgtttctttgagcgcaatcatattgtactacctgagtcagaaacattgtttggaacacgctttgtcccaactaaatatagactaacatctcgaagccgaaacggcgaaaccaatgatgtgactctgtgccaccatgtggttgagtttgtcgcctgatttctagggcaacaatgtgcaaaccaagcaaacattgcaaacggacaaacatagcaaacacaaacagagcaaacttgacaaatgcgacaaacatccacctatgacatcatctgcccgttgctccccaccttcgtactccatacctacagcacgtcgcctcgcaagatgcaaccacaaagtggaagagcaactgcgggccaatgagctattttgggtatttcccgtgctggccgcagtgcccaaccggtaggaaatacccaaatttgtttagcggcagagcgtgccagtcaaattagtagtattcttccgacgcggatgtaaatggcattcgtaggtgcgtgaattgtttgaccaatctgacctatctaattcaatctgtccaatcctatcctatagatatattaccgcaaaatccacttaccggatcagcccatggatctagacttgggtaggagttgtgttgcaaacacgttcagcaagacaaatccgggttggagactaatctgttccttgaattgatttataaagcctgcatagtgcccccctatagtttgtagttacttccttccttattttactactcttttgtaggccaaatcgtcatataacaacccgtggaccttacccgatctttccgttctctaataatttgtcatagagagttagtttgccaggtacgccgatttgatcccttgatttttttttaaaattttgatgcctgaactgacatccatgcagtcatgtctcctaccttgctcagaaacgtcgacacggttgaaattgtgaacatccaccaggatgacatggaattctcgctggtggatgagatctacaagagcctggacccaccaaaaggcaaaccgcgctcattccctacgcttctactctacgacaccaaaggattgaagctcttcgaggatatcacctatttggatgaatactatcttaccaacacggagattgaaatcctgacaaaacatgcgaagaggatagttgcacgcattccggagaatgcccagctggtggagctgggaagtgggtcggtgacaccccacatctccatccgtcgcctcgcgcggcttggtgatcttgatctttggcccaagttctgacgatcttctttttttagaaacctgcgcaaggtcgagattctacttcgagaatgcgaacgggttgaaaagaaagtggattactatgccttagacctctcattgggggagctgaagcgaacattctcagaaatttcgcccgagagcttcactcatgtaggattccatggtcttcatggaacctacgatgatggtctcgactggctgaaaatcccagagaaccgcaagcgcccgacggtagtcttgtcgattggctcatctatgggcaattttagtcctccgggtgctgcggaatttcttggtaatttttccaagcaattgaacccgtccgatttcatgcttattggattggatgcatgcaagaacccggagaaagtgtttaatgcctataacgatgccaaaggtgttacccgccaattctatgagaatggcctcctgcatgccaatagggttcttggcttccaggccttcaaggctggtgaatgggaggtcttgactacgtatgatccccgtggaggacggcatcaagccttttatgctccgaaagttgatgtggtcatcaatgggatcaagattgccaagggagagaagctggtatgcgaagaggcatggaagtacggtcgcaaggaacgggatgagctgtggcgcaaggcgaacctcatttccgaggtcgaatttggaaattcgacagaagattattgtgagccctcatgttctgctcgaattgtaattgcacatttgttgactttgaacagaccttcatctgttatcacctgctgcacttcatatctctatgaacccttccaagtatgcagctcagccgatcccgagtatcggaaattttcaatctctgtggattgcatgggatctcgcgaccagaaccatggtccctcgcgaggagcttctgtctaaaccgatcaaactccggaaagcactgatcttttatattgggcacattccgacattttttggtgtgtctccaatgttcaatgttgcttgccatgttcactgctaattatgctgaaacttagatactcacctgacgcgggctttgcaggagaaatctgttcagcccagtcattataagcggattttcgagcgtggtattgacccggatgtggaagatccaagccaatgccatgtccacagcgaaacacctgatgagtggccgccattggacgaaattctcgactaccaagagaaagtgcggactcgtgcacttacaatcctacaagagggatatgcgtcgcaagaccgcgctgttggagaggctctttggattggatatgagcacgaagcaatgcatctcgagactttcctctacatgctaattcagagcgataaaactcttcctcccacaggagtggatcgcccgaatttcgagcaaatcagtctccaggcaaagagaaacgaaacgccaaacaaatggttcaccattccacaacagactatcgaaattggattggatgactccgacgatgaagttgtaccaagtaaatcttttggatgggacaacgagaagcctcaaagaaaagccaccgtgcatgcctttgaagctcaggcgagacccatcaccaatggcgaatatgccaaatacatacaggataatggtattcaaacataccctgcatcttgggtatttaaccagggccaagacaatcccatttccaagggtgtcggttcctcaggcgcccaggccgggtcgagctccagtcctgcaggattctctctggaggacgtcacggttcgaaccgtcttcggacctgtggctctaaaatttgcacaagactggcccttggttgcttcctatgatgaagtggccagctatgcaaagtacatgaaatgcaggatccccacgtttgaagagaccaggagcatatatcactacgcagaccaactcaaggctgatagagttacaaatggccacgggtatgaaaacaatcatagctatgatatagcaggaactaacttataaaataggaatggggtaaacgggcttgataatggtagcaagccccactctactgatcagactattttccgtgatctcaccggttgcaatgttggctttcaaaactggcaccctgttcctgtcacaccgaatggcgatcggttagctggtcagagtgaaatgggaggtgtttgggaatggactagcacgcccttgaagccgcacgacggcttcaaatctatggatatttaccctggatacacaggtaagtgatacttgagcatccccaccgaacccaagcttatttgcctcgatagcggacttctttgatggaaaacacaatatcgttctcgggggctcctgggcaactctgcctcgcattgctggccggactactttgtgagtataaaccctatgagattcaaaatggatcaactaacacattttagtgtcaactggtatcagcataactaccgttatacatgggcgggtgcacgtctagttagagatctatagatagagcttgaacaatgccattgagccctccagtgctcaatgaggatgacctcattctcgcgataagagataaacagtggggagcgtaacgtgactgcccctccttccccaacatcatctccaattccatgtcttctcttcattctagttgaattgtaaataccttacatgatgtcgctcgaaactattacaactatctccccggccaccaatgagcctgtcatcactcgtaccggtgtctcatcggaggacttgaaacagatccccgtggccgctcaagcagctttccggtcattctcacaatccacaactttggaacaaaggcagaaaattgtggaacgtgctcttgacatcttggagaaaaagcaggatgaattggcacgtgaggtcactgagcagatgggccggcctatcgcctatactggtggtgaaattgcgaccgccatcaagcgcagtcgttacttgacccgcattagcacatccgtactaggcgagcaaggagttgtgcctggggaggaggagaagggattcagacggtatattaagcgttcacctgtcggcgtggtgctgattatcttcccctggaacgtgagttcaagtcgtcgagatattgatatacctacagactgctgataagtacatagtacccctacctcacccttgtcaacagcttgattccagccattctcgctggaaacgctgttgtcctcaagccttctccccagactccaacaattgccgagcaatttgcctctgcttttgcggtggccggtcttcctgaaaatgtgcttcaattcttccactgcggatctttcacatttatcgagaccttggtgcgatccccactggtgaaccatatctgtttcacgggttctgaagctggtggcctgttagtgcaaaaggcagcctccgatcggattgtgaatgttggtctagaacttggcggcaaggacccggcctacgtgcgggacgatgtagatcttgcctgggccgctgaggaaatcgtggatggtgctatcttcaatagtggacagagctgttgcgcgatcgagcgtgtttatgtccacgagaagatctatgatggtttcattgctgaggtgaagaaggtcctgagcaactaccgtgttggcgagccttctgatcccaagacccaaattggtcctgttgtctctaagcgtgcgaaggaggccgttctcgcgcaaatcgaggacgccgtgcagaagggggcgaagaacgagactcctgccaatgagacctttgagaacttccctccgaatggaaattatgtcaagcccacgttgctgaccggcgttaatcatgatatggccgtgatgaaggatgaaacctttgggcctgtgattcctgtaatgaaggtctcggatgacgacgaggccattcgtctgatgaatgatagcgacttcggtcttaccgccagtgtttggagcaaggatgttgcggcggccgagaagctggttgagcatgttgaagctggcactgtctttgtcaaccgatctgactaccctagtcccgtaagtgcaactcttagcatatatattattgtcccccctttgctaaccaaagtaccctacaggatctcgcttggacaggctggaagaactctggtcgcggtgtcaccctcagtcgattcggatttgagcagtttgtcaaactgaagagccaccacatcaaggattaccctaaataaacatgtgcatgtgagataattacattttggtcaggcgtataaatttcaccacgtagaccacgactcagaatcaagagtactattctcaacgaatcgacaatttcttttctccagccatgcccaggtgcggattagaggagtatgaaaaaaaaagaaacagacttatcttttgcgaccgcaagagcctcaacaacctcgctttttgcagtgagatcccaggctcactatctatatactggcaagcgtgctcttcaatggtactacatcttgctcatagaatattttgaagggtttcatgacccacttgagtaaattgttggaaagccggcttgtaattgttcaccaaattcttagaacatcgagattttacttctaccttattttctcgtctctaatatgagactaaagctacgctctgcctgtccatgtaacgggcttttgtcggctatttgagtttgtttcaggcaggtgctaaaaatacaactgccaactgtcaactgccgaggttgtagttgactcacctctcacccggcggcgtattgcgaggatcaacaaaagctcgatcaactctctaggccctcgtcatgatgtcaatcccattgtcggaggaaaacccctttcaatccttgattgccgaggcaaacgacgattcggtgggtggatgcgagaattatgaaactatcagatgtttaaccctttttgatctaataataggcaataatacaatctcgatacgagaaccaccgagtggctcgcaatagccagcaaagtgcacaaattctagccgacggctttccaggctggtcccttgacgagattttgaagcgacttgatggccctgagaaggaagacggatttgctgatcctcgaaactgtcttgtcatttgggccagaccatcgcctcaagtctgcgacatgatacgctttattcagaatgagttgaagagcatttctccttgtaagttcaccaatatagaattccctggcgcgggatttcctttttagcccttcatttcgctaacatgagtggtcatagcactctggttgatgccaccttcaaaccttcacataactgtcttggaagccgctcattccctgacggaagaacaaatcgaagaacttgttcagacactcctgtcatccaaggatgtcacgcctgcggatattgcggcatatccacgcagccaccccacgcgtctcatcaagcctatgataagctttgattctgccgcactagcgctcagctttgttccggctgctagtgagtgcctagaaacagaacctagtagcgataacgagcactacacataccatcatcttcgccgtgatgtatttgacatggtccgacaagccaaggtccctgttgcttcgcgttatatcgttccctccgcacatctcaccatcgcaaggttcatctcccaggatgggtttctagtcaggggatcagatggcgcagagacggtggaccattcgcgagtcaagctgttgattgataaaattgatgagattaaccagaggttgaaaaatgagtattggcccaaggagggtgcggatgcggtcagggacgggggtgaatggattgttgggcaagagggtctagtcattcggagaggccgtctttggtatggagggggtgaggatgtgccacttgactagatctttgcgttggaagattgagctctgcctattctcctagactagaagggttttgcatgttgactatgcgtaccgaattccttaactagaccttcctctacgagtcgtgctaccgtttgccaacttacgtgtcgagcataatcatgaactatcgcttggtgtatggacgatgaaaagatccacataagatatatttagcaggcgggtgagcgccattgcagagtcgtatgtcgcaactatcagtttctgtgcttgaaagcctgagctcaacccacgcgatgtcacgtgctagtacaattcctcaaaatggcgcaaaagaagcaatgcaaatgtattttaatgatagattactatatcagatggtagatattcaatcataaattccaataacatctactgaaatcaaataagtcgaccttggtgagcgtcaaatagcatttaagcttggtcccactctgctttgccctataaagcacattggttcaaaaattacaacgcggccggctggcccaatggcaaggcgcttgactacgaatcaagagattgcaggttcgatccctgcgtcggtcatctctttttgtttcttatttttttgctgtttgagatttaagagtttctgctacaataattgttatagtggttaatatttcaatccacgagtttgggaaactggaagataccagttgaattgcagagtctaagtagattgataactctgctttaggcaagcccgagaatacagtagactgggtgatttggtccaatgtgatcatttctagttcaggtgatcgaacaatgagcgatgcatttgttagatctatgagcgcacccccgaacctgtttattataagaaaaaaaatatatcagaagataaaagcaacataccgggaatcatttgacaagaatttcaaactcggatctgtaatattggcttttgggttggaaagtagccattctggtattgcgtgcggatcgaagaaggcaaggatattcagcagtattttcccttcgatggacagggatcgagaggaagccttgcaactcgttgacccatcttcatattgcgaagacatagtttatatggcgaatatattctcagtaggtttttttatagacaagcaaaccacataggaatagctacggtcatttgggaataggcaaaaccgtctcaactggccggcaaaatgcggagttaatcttggtatctcggtatgtatctctggccctaatccttgtcgacttctcgcgttcgtataatggaggaaaacaggagatggattcctatggacaccggatcatgttctgctcatcacacaaattatgaatcgtccctcactgcatgaagctcagcattgtggaaggttaagcgcccgccaaggccaattaagtgagcgttttatgtcgacctacatgatacgttgcccaagtcatatatataatgaacaccgaaaaccttccaaccatagtcgattgcattacttccatttccaatcagacaaacctaataaaatccgacctacgacgtttcctccgttaaacacgagacaataagcttccaaatcagatcgccaagccacgtacactcaattaagaaaggctcggtccgtcatagcacgctatttcatatcaaccaataagctttcttcttatttgctccacatagtatacgcgcccacaatgtactgaaagctgaaagctgaaacagtcatgaaggggttaatgcggctgggtaattttagtggcggagatgaaagcgataggacaaatgcgatcctggtcaatattaatcctatactatccggcagcagtcaagcaacggattagcgttttcatttcctataataacgccatactatggtttccaacaaagccagttagtagcacagcagcctattcatctacaaagaatgtttattaagtgacttacaggaaaccaacgagcccataagatttctatctctagagcgtttttggtttttgctaaggactcccacaatgacctacgaaaaatacaacctcgggtcaaactacgaaggacacataccacgcatattagcatcgatatgagctggtacgacccatggctatttcaacagctgcagaatttacctcacagccttgtgcaactccgagttggaacatgcaaaattcaagacaagcagagcctaaaaactctttttgagggcattgaagaatactgcgcacgggaaactgaggcggtctctattgatgaaatcactgcatacttacgagaaactggagtcttcgatcacacaaaggcgctgcacggccatcaaacgcttcttgtctttgccgctcttggttggcgttctatgttgtaccaagctgctttcaacgtctgctcaatgcaagaattagctatccatgaagactccgaccagccacagtcaggtcttgtttttgatatgtataaaatcccggctgaactgtccgaccgcccgatttctgttctactcaaagcttttgggcaccttttaccagcgcgatcctcgaattctcgctatcttgcaagcgaggttggtgggatagcatctatttggcagcccttgaatcccgaagagaccaatgcatatctacttcatgttttgcttcgtgttcaaattcgatgggtcgatactctatcactgcaccttgactatgacaaaagcactaagaccttatgcctcttcagatatccgtcattttgtcttgaaatgcttcgatcccacgggttgatctactctttttctagcaatgaaagcttctcaggggatcctcgttcaaacgaagaagaaatttcgctatttctgcaagaggtgcttttatcctatcgtcttctttttgcccagtcggccccatcgaggaaactctttcgccaaatatatacgatgtcggatttgcagagctacccgacagattccttactttttcagttgtgcacccagaagcggattgcgttgacaatgctcccaacagacaagccaatctatttcgctgcccgagactttcccgtgctgtatgacaggatcgagctcatggctaatgatctcaaggatgcaagaccaagctcaatcttcagtctgatgaaagacagacgtgatactttgacgtactggacattttggcttgtggctatgttcggcggcattagcattcttttgactttggttcaagttatcttacagggcgtgtcaatgatgtaggccctattgaatgaataatcaagcatcgagctatttcaagggtatctagtatgaaagtgaattcatacttcgcaagtcgtcacatggccattaaatcgggcagaccttgtgttgtttgaaggggttgtctttccttcatccatctcagtcaactgttcatttcctttcgtgtcttctggagaatccgaccctcggcaaccaagtacttcggtcatgtgatcgaaattatactaccccgctcctaacaatgtccttactctgaccctcctccattattctatcatacagaaggaatatccaacatgtcgattacccatatcgttcttttccagttcaagccggaagtagccgctgaggttgtccacgatgtacgttttttaccaaaattatcacagatgaacttgactgtgtactataaacccttaatggatgttgacaagtacctcaaaaggcctgtgagcgtatgctaggtctcaaggatagttgcgttcatcccacctcccagaagccctatatcaaatcggcgtctggcgggaaggataactcttccgaaggtatccaagtaagttccctgggatcccagaggacgaactctgaggatatcttactaatgcatgatagaatggcattacacacgcatttgtcgtagagtttgcgagtgctgcagatagagactattatgtacaaagcgatccctctcatctggccttcgttaaaactcttggtgggatcatcgagaaagcacaagtcattgacttcactaatggagttctctgaggttctcagtgactgcttcaagtgtccacatatctgattttatgggacatatagatactgtgaaagaatagaccgcatgttatattcgttcgcaatcatatatacgctaccaattatttcatgcagcagcctagggacttctagtacagattatatatcagcagctaaagctttctaacttggctatatgccttgcactaatccaaaacttggtatttgggcagacctatattttaagattattaacatactcatgaccgctcacccatagcacagacaaatccagagcatttgtgggttgatccgcagagtgcaaatatttctgtgtacaaacgtccaacaagaatggatcctcagcgcaaggaataatatctcccggcaaaatagtaaggctcttctagatctagagtttaatgaccaggaatgtaagccaagctcgaggttcgcgaagcactctgtcggagctagccgatgcgccaataatatcttgttctcagataggcaccgggttttctagctgaaaactctagatctagaagagccttgcattgcgaggactgtaagcataccaaatccgagcttagtacccatgggtttaacgtttaccagaattgtagttatacgttggatacctgaagacaataagattcaatagatgtttagattgagttctcgtaaatatatcatcgagcgtatttcaaaacttcaagaattcctcatccctgcggtttcggtaagttagggctctactctgttttctcggtgaaacaacctacaacaattatacctgacatagagaaattagagtaaaagatagcttgggtcagttcttctgctgtcttccatcttacaattgatgatatgaatgagcactgcgtgaaacctttgtgagctgttctttgactcggcattgctccgaagcaagggagaagcgagataaaaaaacgcgccaaccattcccgagcctcgcagccacccgcaaggtcttttatttcgattgaatagcggaacgggaaacgggaaaccgaatggagaaatttgccttgtttcggaatggccaatgtggctggaacattggggtgatgttctcattgtgaaaggtcttaaaattgccttcattgtctttgagcctgtgtatacacttgacctccaagaggactaccgaataaaccgcggtagatatgaacacatagttatctaacgcgaacaatggctcaacccgcaggatcacccctgtcagtgataaattcgtaatcgatcgacacggctacgaagctaatgatcgacgatgcatcctaaaattggttgccgagaaccgggtcttatgaacgcccgatttccgagacaaagacaaagaaaacgaggcaaagaaacattttaattgagctggtgagcttgcatggaaaagaagaaaaacctattatccccagacctaggaacaaggaatcccgagcttccaagaccctcacagggttcattcatgcacatatccgactcggcaaacggagatttcagggatcggcggctagttagtattattgaaatgtcgtgtacagaaaaaaaaaaaaaaaccaaaaagaaccgaatagacaaaactttaaagaaagataagtctctaatccaaaagtggaaaaggagacacgaagaatgagagggatatgtttcgccagcacacgaggttttctctgcttcttctcccttttacccctttggtctgggctgctttgcacttgatccactgaggggcgaatacctaatctgcatgggtctctaacgccagcatatcttccctgcaggctgcaggtcatggctgccgcttgtaatgcccatctatattgcgtccgatgagttgcagcagatcgtgggtgagagatagatacccgtagaagcgagatcgcctcgggggatagacacttgaactctcaagagccggaataggtcaaagggacttcaagcattcggaactctctgcgcaaagccaatccgatgcaagacaggctccccagggaggacccactgccgccgccagggagcgaactgccagattggagtcctgccgagcctgtcattctctccatgccagacggtggtcgcctagttcaaccggggtgagactgtggatcggttcgtccttgacacgccgagaatagcatagatgtgcataactccatactaatatatgtgctctcgcccgccggttctttgactctctttcattctctaagcacacctcaatggtgtaaagcggttgcaacctttttcttttttattctaattttctttgggtgttgtcatccctagtctctcgtttcgctttgtcactcgttgtatagtatttgttgcacctccaagcgtcgcctttattcctttcattgccttattcgcatccaaggacatcctagctggaatcgccattgttgcaagtccccgcgaatcgcctagcactttataagagctccttatccgccgaccggatcaaatcgaaacaccatcaatccaacatggaatgctttcgccaaattttccggtgcctaaaggcacctttcaaacgcgacaagggaagaattattgaaattgtaagtcgagtcgaagaccggggaatcgttcgtcattgcaaagacggtcgctaacaagtttatgaaacagggtcctcccactaatttccgaaaagaagaattgcctgcttatttttctgatgccgagtcagttctctcgcccagccaagatccagcggaacgatcaaatctgaccaatcaatcacaggacgcttacgtccgaggacagccgcatagcgaccgtggagaaggacgaaacaacgatcgagatgctatcgctaccatcgtcgacgaagagcaagatgcgggcccatgttcgaagaatgagcgtgagactatccgagagcgcgtgaagttatcccgatggtggaaatcaagcccagcttcagatcataaaactaaggccccggctgaatcgatcaagatggaggaaatgcgaaacgccgatttggcgtgttcatagggaaattgtgcattggtatatggatggtcacaccaagaaggtgggcacttcggtgtgccgggatctttttgcatctaaattgttccctccgcctgttacaggcgattgtcttgcaggagattccttggacttgtcagatatagagtaatttatccgagatgactctggtagttcatcgaggtcatcgaaaagcgattgaacccgtgatttatacgcgttcgctggactgggtcgcccatgtgtcggcttcgctttcggttttgacgtagacatgcttggtatttcaaattgttgccgggctcgtagtgttgtctgatcgtgagcctgagcttttcgtaaagtggaatttgttcccttgggcggtggtagcactggccggggttctaggtcaagatcgtcatcgtcattgtcatccgagcccgaggccgtctcttcatccagttcaatgcttataacttctgatactcttgacggtgcagtgaaacttccgatactgttcacccgggctcgtccagtagccaaagtcggtgcttgtccaaagcccgcagcagctctagtagaggactttggcgcgtgagctcccgctaaagaccgggtttttcgtgggctcgtcataaggtcgtggagatgtgttccagcccatctctcatcatcatcatcttcttcatctttctcctcgacttctccatcccctatatgtgcgagtccagctttttgtcgctccctcagcgcttcagcttctctttttcgctcaacctcatttggtagtgaggtacgcccgtctgtaggcctctcaatttctcttatcccggctgcgtgttcggctttcacctgctttcgccgtcgcaggtactcggcgtgatgtagatgttgagtaaatgtttgcgcgacggcgtagaactcgtcctcgaccatgacccagccgtcatcgtgttcaataccctcaatcaaaaatctataacgtgcttgttagcgacttcgtctggttgtgcgtggtctggttgcgatcatactcttcggatggacaacgtctgatgggagaggtcggcgggctttgggctgtacaaagtaatcagtctttatgtttcgtctcaaatattcgaagattagaagagacctacatgatctgaagaaatcacgcctggggggagaaactcgagggtttttgggagtgaggtcgcgatcagcaagttccgtcttcacgcgcttccgcggtgttgacttttttttcacaggggtggtattctcagcgcgaagccagggcaatgtcctgggcataattaagataatatagaccgaaattaacaggtcgcttggtgtcgtgattttaggggaagattacagtggagggaaagagagctgataggcatccgtagccgataaggtgaggtcacccgcattccgcgcaaaatagatcttcgattttggagcttcactacggactggagaatttgcaagtataagcctcgttatttggggtatctaatgtcatttggacattggtaatgcaagatgaaaagaactgggatggcctcaaacgccccgtgcaggatatatcaccgaaatcaagaacgaactgccggtagaacgccattcaagggaaacaaaaaaagaaaggaaacgccagcatctctgcaagcaaaagtccgattacacctcaccaggccgcttgctattgcagctcacgatcttcaccttgtccgcggatacagttgtctggttgtctagcttgaacgagacatccttgatcaagaaggtccagacttcgtcgcagaatcggtaggtgtcgaggtggccctaaaagaagtagaaaaatgtatacatcagcctcattgaactatgatcaagcaatgctcatctgggcaagggtgttctctgaaccggaatgagttaccttgaaggtcagtctggcccgaactttgtccgccaagacttcagtgacaatcttgtcaaaggtcccaaggatcttcatcgccagctggggctcgatacggccctcattgatcaggtcgtcgagggtatcggtgagggataacccgaggctgaatgttccttgggtcagttctgaaactttccgtttgtttcatagggtatattacctgctgccacggtaaagctcatagtaagctactgatgccattctgagataaaataatggcagactagtcgagagagtatcgggggagtgattgacaggagcaagttcatgatcgccggccgaatcgcggggggcggtcgccagcacgtgatctcaatatggtcacgtgtatattcttatctcaaattgcgtcagagtcagatgaattgaatgtgttggaacttatttttgacatcacaaaactctcagtaaacagacgacaaattcttaaaactactgcattatgattgtgaaggggttagggcctcgatctcctctcaatagaagattgttcagtcaattgcaagttcattgtgtacgatccttatcgacaagcttgttcagaccatcggaagctcaaggtcagtcagttccgttcaaatgcccaagtcagagctaactgcaatgctcctgaattttagaccctcaaggctaccaaattactaaatccaagcaagagaaaaccaatcagacaccagacgactcctcgaacaaagacaacaagtcacctaagcccaaaactgtctccgaagccgacgccgagcttcgtgagcggctggaacatatgtctggagaaggtggggcctctggaattgaatacgaagacggtaaaccgaatgcaatgaagcgcggcgtgcgaaacaacatgtttcgaataatctgaagcaatcttcgacatcaacatatctcaagacaacaaaccttgaccatctcaaatgttacaatatatatcaagtgaagtctcatgttctggaatctagacttggccccctgtgggaaagaaatgttctcaccgtttccttccggcctcgggggttaaagacgtctaccaggaccagacttgaatttgcttctgaaaacatagatgaggatttccagccttggctgcggttggctttgcctaattagtccgaatatgtgcatgtggatcttctttgatacagatacaaggtcatgcataatcaaatgcattccgctcttcaggtgttcgtgcattctccgatgacgattccttaggtggagccacgcaatcagtcacaatgttctcgctgtgaacttctcgactttcaatagttggaatattcctgcacatgtgccattggaaagctttgatttcgttaggagatgacttcattgcaatgtgcagggtcttgggccagagcaagtgcggtgaattgcatgcacgtcctgccagtgctcggggtagtgccccataggctgggcttcaacaccgctctgatcggcggtgaagtcttccttgtagaattggattttgacaagaaaaatgagagaccataaacatagcgagccaatataatggagccgaaaatggactagtccaagtacaattaaagaataaatcaatggaatcaggaccgtccaaaataggatcacaatggcagaaatcagatatcatttctatgcagtgagccccaacttgaattcaaagaaacagacattatcctaccaacacctaatttcgaaccattttcgcattgccgaattccacccaaaggaaaaaaaaacaaaaacagaccaatgcttgctaacatttcagagaaaagctcatttccgcacaaccatgccagccaaaacaccagcgccaatgacaccaccgtcggatgcttcccgtaaaaataccgacttcccacctcgttgcgggccagttcgcatgataagacggtcaatgtattgctggcacatctccttgaattgcgggtaatgttggataatgccaccagtgtaagccacgacgagctcttcaggaccggactgccaatctatcggcgtaggatcgaggacaggcacgacatgttcctgggctgcgtggctcgcagcaacagcggcagagttgaggcttgcagccgcagcgtccggtgcactaagggactcagtgatggtgtcgccgtggatctgaggtgaagcgggattctcgggtgagctgctgttgctatcttctttcagctcgatctcgcgagcacaggctagtagtccgaccactgcagcggcgatcagcccggctgatcgtctctgtacggtgcgagcgatctttcggaatgcgcctgcggctcgggcatcccagcgccagtcgctgcactctggtggggggagggatttgttcaaggctttggcgagatcgttgtcagatcgggctttagcaacaacgtcggagatatatgtggttgtcagggcgtattcttggatgaggtttgcaggtagggagcgtttcgataatttggctactgttgtgagatagtcgaaaatgatcaagcgaattagttcaccaatatagcggcctccagtcatgtattcaaagggctgaaagcctggccgcgaacaggcctggtctagctcaatgtcccatttcgtggtcacattgagctccttgagtggtggcgcagcacctgaaatagtccactcggtgttgacaacagtctccacagcgctaggctccattatgttcacgctcttggctttcgattcgtgcaatgcactaagcttcattgggatggttgcgttacagccagtacccacaatgatacccatggcgactctgctgtttggtagagatttgaccttgtatgcaagggaagctagtgtggccaccgtgtcattggtgatagcttggattttcagttttggtaatgcaaaaagctttcgacgtttggttgaaggttcatcttcatcatcgggtcgccttgtgtgtttttcatatccatctagaagtatattgccaagattgaggtttgacgagatagcgaagcctttccccatgggcattaatgtggcttctgctaatgattcttgcctgggcttagttagtacaaaatccactacaacgcgaagggaaccacacagcccgacacccataatacaagcacaggcggaaaaactcacatgatggggaaactgaatgtgattcccatgtccaattcggcggggatgtcctttttagtagcatctgatgatagactctccgctaccacctccgcaatgcaatccccgatccaagaaaagagatcctcagccttatccatcttcaaatgttcttgaataggccaagctcgttccagcgttcgtttcacccgctggcgctgagctttccggatagtgtcgcgtgacctctccgtggcatctgtaggccgaacatcggaatcgacggcttctccgagtaattcgataaaagcgactcgaaggttgctacctcctacatcgatcgccagatagcgaccggtttcccggccagtaggaagttgagtcacgggtgttggcaaaaattgctggtccgatgtcagggcaaggttgcggtatgtggtggaaaagcgccgggccagtttatacagcacagcctcatccaggaacagcggtgacaaaaattcttccaattgttgatggtgcgccagacattcttgttcaacggcgtttagttccgaactagcctcctcatcatcttcaatcagatcgtcgtgcatgatttcgtgctcctcatcctcatccttcttggacgattttgagttaaccgaggccatgatgaaggatagtagatataccccaactttttttttagaaaaaaaccccttatgtcaggttgaaaattccagacaaaatgagccgagacagctatgtcaatagtgacgtgtagggtctggaatgtttaggaatagagacagggcagcatatccttaaaatccttaaaatccttgaattgtggagacaagctaccggcgctaatccaatgccccaagagctagtcttgttgtgttagcgaggttgcaacaaagggaagataacatttcggtgacgcggtctgcaggtcgtccgggctgcgggggaaaaagagaaaacacgacgatcatgccagaattggaaaccccatatatggtttattccgtacataccctggaatttggtatgcacagattgcgcagataatgaaaacaatatttctgggggattcggggagatgggatgacacagactatatacgggggggaatcttttgggccaagaaaatacccctagatggccctgagggattgggtgaagaatggaagtgtaaagctccctgcttaagacgggacagagggaaaacaaaagaggaaacagaaagagacaaaataatatatgggatttgttcaacggtacctttatgttttggtcagactaagtattggagtcatcggaagaatagtcggagaatagtcggaagaagtgggggggaaatgatccctatcagatgctatgtatatatgatcagatagaagaaagattagacagtttattagaggttataaggaagaatatataagagatgggatgcgaccatcggaagacactaggcaatgcgacgctgttcgggacaagttgaggatcgccttgactttctattggattgggaaaactctacttggctttaatatcccctctttggcgtctttataaaatcaacgttgcgaattctatgtaaccctacattaagccattatatccggctaaacccccttccctagctttaagtagagattatcccggagagccaagccaacttctctatcttggcagtctcaggattagacaaaacacacgagcctgcgtattaaagcagaagttccaatctgttaccgactaatatgcctctatgagggatattggtggggttgaaggattccggcttggaaaaacgcgccaaagtatcgccaatgttgctattcgttcaatacgagggacgcctaagtgggatatcctacttgtggcactcgcgtgatcggtccggacatgcccatattcagacgcaggcacatctcacgaccttttgatctgacgggaattaagccgttcgcacggtctcgatcgttcgctggcatccgccacatcaggctgtcagatcttactagaggcggttcaaactacggggtaccttaccttggggttgcctgcccataattggtcatctacctgtcggcaaatagtccgattgttctcgtgtttggcataattctatcgatagaattgtttacttcgtaatgaaggtttcatgtacgagcctcaaagcacgcgatctcaagccattatgtacagtctgtccgtagaccatacccgacaaagcctagtaattctagacctggggctattcgaaacccaagctatagagtagtcgatgccccatctaagttgtctccgaagtcggagcccagcctaatctgatgaatgtgtacggagtacacggatatgggtagaccgtactccgtatagcctcggtgattaacggagcaaactacaacatacacttaaaagtggacaggatcctaccaatagtaataaatatgtaataatcacagggctgcatccttattagttaacgataatcggtcgggctcctccgtagcttagggtagttggggaataccttatgtaatggccttggcagcccaaggttcacctgggactctccacatgatcttatcaaaacaacgtcactcctgattttaccccatcatggagaaactaccgatccactctaaggagggatatggtgaccctcttgaattagcaaacaaccctgatcgtcgtgtgcgttctagcacaacaacctatttgtatcggattggtgtcgtcgcgttgctcttcgtcggctaccttgtgcttctacggccgtctcacccatgtaccggcatagctccacaaacggagagctatcaagctgaggttcaacaagagtatgacgactacttaaagctgggacattctgctcctgatgcacatcaaacacttgaagaaaataagatcccgctggaggctcacatcatgagcaaatgcccggatgctcaggcctgcttgcaaaaactggttctaccggctatggaaaaaataagtgacaaagtggacttcaagctatcatttattgctaggtgagcatcaaagtaaatgtgcagaataaccgatgttattgcaccagagtccatccgaaacatttgactgatactataataatagtgtgtctaaagattccgaagagatagcgtgcaagcatggcccaggtgaatgcatcggtgacatgctcatgctctgtgcggccaacctacctttccctcctaccgcagacgaagcatctcttccatctcagtatccccggacccctatcatccggtcactaggattcgcaaattgtctgatcaatgactttgcccggatcccagaccgcgagtttgttcaccaatgtgcaatggagcatgggattgactttgacgccttgaacaagtgtgcgagccaggagaatgatgatccgaacgatggcaacgacggcggaccaccacttagtggaattgcgctgctgcgtgaaagcgctcttcagggcgaacaactcggcgttaagatcagttgcacagtgcgtctagatgatgctgtttggtgcatccgcgataatgatgaatggaaaaactgtgtccataatggagcaggtagccagccctcagccctgatcgatcaagtcgaaaagctgtggaaggagagaaactgagttctacatggatgctttatcgttcataccccgcattcatacccatacgataggacatgacactcgataaatgccattgatgatcccctactatcatattgcaccaccgtaggcattccctacatttcgagtaggcgcttaagccatgccttcccatatgaactgccctatttggtgaccctaactccatgtgtgtcatgagttgaagatggtgttttcctcgcttaatttaaacaaacaatgcccattagccgagtcacgcacagttttcctcgccattgttgcatttaatcaggtcagagaccttttcccttcaccttcctctttctctccccaccacaagccaccatcagcacagtgcggcaatcgtcctcgaaccgcgtggagcttcgcaatgtcaccagtttctcatccaaaacagcgtggtaagttgtttcagccttgatcgactctattaccatcatctcgtcatgctaacaatttgggatgatagaggccaaatctgtcatgtcgcgcggggtgtgtgataaggaagagaccttgtaccttaagtggagtctggtgctgagcccaagcgagcttctaaaagagcttgttggcgacagcgagcatgctcgagccctctttcatggaatgaggcgccaggtccggtccatccgccgccgctcgcagtcctatgatgatggacaggtcacaatctacgaccgtgttctccttcgtctctatgacgagggacacactatgaaacactacggcctgcttggattttacctgaccgagcatctggggactaagaactgcaaatcggaggaggagaaaaacactctagttgctgcccacttagctgcccagcgcatcctggacaatggtttgtcgctgcgtgttgagcaatttacttttcatgcattctaacataacctaccaggccctatttccgaaatccctgtcattgcagccgataacgtggaaggaatcaccaaggacgccaggaccagcaagtcgccacagagctctggcacatccaactcacaccatatcgacaagctcatccaggtgtaccagaaggccaaggctgactactacatccttgaagtcaccgagagccaccgcgagcgaaccaacagcgttcgattcctccgtgacacggccgaaaacctcctgcgatacctgaagtcagtcaaccaaggccacgatctgatccccgagatcgagggtatcattcgggtcagccaagctcatgcaaacgaacttgccggcggccgcaagcgcaagtttgagcacgtagacaacgactccaggggcagcccaagcctcagcccctaccgaccctacggattccacagagaccagcgcagaggacacaaacgtcgtgaccgatatgtccctgacagtgtcacatgggaatacagccatgttgaccggcgagctggacgagatagccgtgcccttgactcctaccgtccttcttaagctcactgttctgagctgaccgaacgatacgttctgaattatggggtaaccattttcttcgctaccgcttagggaaagtacaaacctgcatgtactagaaaaatcagtcccaaattgaatcaacaacccaatttcacaagcaagcgtcctcctccttgtagaatagttgacctcgggacagtcgaagtatgaaatcctaagctatgcgctaagccattctcatcttagcgttgtttacaagcccacgtgcacagatgacataatccctcccagaaggggcctggggatcccgatgatcaacactggtcacccggtctcgcgaattgaggggaaacctgttgtattccttcatttcggttcagggaaggggtaatctctgacccaatggagactacctcactgatcaggctcttagaacgaccccaaaaagtctctcccctgagaaatggcagaccttcatccctccgccgcggggaataatgcatcttccactagctccagcacatcctcaaacccacgattcactccagtttcttatacctcagacgaagaaaacccagtgccagggactgcagaatcacccgtaggctcattgcgactgcagaccaacttcgatgaccaccaagacgttggcgaccctctatccgatttcgagaacgacggcaactataacacaagtgaggaacgagagggcaagattccacgcggcggcttgggtccgagatatacaccggaggaggagagcgaggtagtgaggagatttgaccgaaggctcgtcccgtttctggcacttctctacttgctctccttcttggaccgctccagtatgtttggttattccgcacagcgcagtgctctccctattgttacaagcatgtactgatcgggtatgcagacattggaaatgcaaagatagcaggactccaagacgatctacaactttcatcttcgcaatatgaatggctacttactgctttttacattacctacattctcttcgaatggatgacgctgatgtaccgtgttgttcccccgcatatttatatatccctatgtgtatgtggatggggactagtcgcatcatttcagtgtctagctacttcctttgggggcctggtcgttctccgggcattgcttggaatcaccgaggcggcttttggccccggtgttccgttttacctgtctttgttctatcgcagacatgagctggctttccgcaatggattgtttatctcagcggcaccgctcgcaacatcttttgcgagtagtttggcctacttgattgtcaggttcagcagtgacggcccgatctcaccgtggcgaactctcttcctcgtggaggggttcccgagtgtaattgttgcggtatttgcttggtttctgattccggactctcctggtcgggctcgattcctgagtcgccgacaaagggtggtagctcagcagcgtctcgaagagagcaaaaccgactataagcaatcgtatgggagtcaatttaactggcgagaaatcctgaaaactgcagcggaccccaaggcttatattgctgccgtgagtctttatctatatttgagattgtacaaagggttttaacacatttactacagtttatgtttttcagttgcaacgttgctttcagctcaatgcctgtctttttgcctactatcatcaaagagtatgcccgtcgccagcatctattcacaatctcaacagccagcttacatctcttatagtatgggatactcctccttacaagcccaagccctctcagcacctccctatctcgttgcctttgttgtagtcctcctcactgcatacgcctcagatcgcagccgctcccgaagcccatacctaatagcgcacgctcttatctcctcactcgcttacttagcgatcgcagcaactggttatttccactccgggctgtcaccatggcttcacacattcatccgctacatctgcgtctaccccccccccgcgggggggtttttccccatcaccctcctcattttaatgnnnnnnnnnnnnnnnnnnnnnnnnnnnnnnnnnnnnnnnccccccacctccggcttctccccccccgcggcggggttcttttccgcaatcaccatcatcattacatgggcaatggataaccgtgtcgaaaaggaaggcaagggcgcaagcattgccattctcaatatcatcggacaatgtggacccctgctcgggacgagactgtatcccgagactgacgggccgtggtatattcggggcatggctacatgttcgtttttcatgtttgttgttgctatattggcggtggtactgcgggttcttctacagaggatgaatcgggcggttgcggaaacgacctataatattgcacaggctggccctgttgatcagggtgaggagcgggatgtgctcatgggaggtgggaggagggatgatttggagaattccactggggatagaaggcttgtatatatcatatagtcgatacaataatgaccacttgaggtttctctgctttggtgaggtgatctctgtagaatgttcttattagactgccggtctagaatccctttggggatgaaaggaattggaagagcacgatgtgaatcacaaagagataaaagtaaggaatatgattaaggcgacgagtgcatagtcgctatatgtggtgcgtatgtaaagtctatatgatatgtacatgtgtacactcaagggtgtgtatttcaggtttcttggaatcaaagaagcgcagcgaagggcgaatcggcaacctgcgactccttccagccaatacacttccagcagctcaacaaacctctggggtcgtatttcttcttaattctcaacaatttcgcgtagttatcaccccaccacgcctcgatccaatcaattgtgaacgggttggcctcgttgctgtacgcaccactgccaggagtaataccctcaataatggccgtcatgttttgaattgattggatcttctgtttccgggtgggaagggtagcgttccagtcccaggtggcaccggatcccagctcccaaatagcctcccgccaggcgggagaagcgctggtcgatccttcggtgtagttgtacaacactggtccgacgacggggatataaggtgtctggcccagtgattggatgactgcgaagtaatccatgaggttctgacggccctcaacggtgttgaagatggagcgggggatcagtcggcttccggggaagcgagtgacgccgacagcgacggagctggtcttgacgtatttctcgtaaaaggggtaccaagaagtgaactcctcgatggtggcagagccgccatttgctttggcataggcgatcacgcttgccagagagacctcggcctcctcgacggagaggaaaggagagatgttgacgagggtgttaccggtgatgtggccgccccatccctcctgtccccatttgagggtgttgttgacaacgatctccatgaatggaagcatgttggtggagttgctggtgaacttgatgttggcagcgacaaagcggatagcaggttcgacatggtgagtgctttcgaggaccacgccgaaggttccaccgccgccaccgcgaagggcccagaagaggtcgcggttctggaattcgttggcggtgcggtagacaccgtctggagtgacgatcttgaactcgaggacacggtcaacgccgagaccgtacacggggctcaagatggaatggccgccattttggatccagccgcccgagacaccgacggtgggtgagtagccgccgagtatggttacgttttttgtctgtgcaaattcgtaaacctcgtcgaaattgactccagcgccgacggtgatggcttgatatctgcgagaggtgttcttagagtcgcgtggagcgaagtccgcactgtactgcatagatttcaggtttcgcgtccaaagggatagcgtgtcacgcccactgctgcgagtgaggtaatcatggccactatttttgatgacgagcttcttgccggagcagttggagaacttgaaggcttcaatcacatccttggcactctgcacctcaagatagtgagagggtagattaccctgacgacaggtggtattcacaaatgctagggggtccgtcggatcgctgctgtcgaggaggcactgatcactagggtcggatgcccacatctcatcctggttgttcatgtagccattaggataatttgttcgcatcaatggatccgagtagttggcctggatagtagcacaggcggcattgtcgcgagccactggtttcccattgtagttggagaagcagggcaaggagaaaggagtgagaagctggaggcgccctgcaacagttgcattgaagtcattcaaagtgcagtgctttgcaacagtcgagcttactaaggccaataggaccaggccggaggacttggccaacatcattgacgattgcagaagaaaggatgaaaatcacgacacagaaaaagtataactcagacagaagaaccagctgaggagaaaaggtgtcttacttgtaactaagaatttaacctatttcggcaaaagatcaccgcaatatctgcacgatctatataattggctggcccttatattaatcaatcttaagatactatcctgcagactccaaagcttgaagaccggcaaggaatattgtatttccaccggaaatcccactaattattccacttattattcccttcagaaagtgaatcgtccaatggtgacatctagctctccacacaagtcgaactagttccaatcagatgccggtgaaacctcgtataaatcggccctctacaacatagggaatgaagcgtatcatctatattaaattgcctgattattcgaaacccaagagattattttcgtatctagatatgtatacatactgactacatgtagcagagagagtcaattaattccttgttggttaccgctgtaaaatgaaaacacgtaatttatttaaggtggggtccaccatccctgatcgggactagcctacagtcaactgccggtcggtgggtcctgcatgtatgaaaatggaaatgtccggaaaatgtcgatcctcccccctgttcgtctaagctccccaatcactcggttctcggttctcggttctcacgaagttttgattttttctatcttcccaccatgtcaatatggagcaccaggtgaatgtctattggaaaaacgtcctcacgattgtgccaattgttggggcgggcgtggctactattacctacctgttacgtctatactgcaggcgggtgaaaagggtggggctgttgctggaggattatctaatgggcgctggtctgatcctctcctactgtgtcacagcttttgtagtagatagtgagtattcctccccatgaatctatcatactaactatactaactattaaagccgccttcaatggcgtcgggctacccatcacatcgcttcccaaatatgaacggatgcgtattcaattcgtatgttatagcttataccgtggtaatggaaagatctaacagcattccgcagggatcatggatgatacagaagttctgggccccgtcaatggcttttgtcaagatctcgattgtcatctttattaaacgactattcggctcgatacgtgcatacgtcattatcaccaattgtctcgttgcatttatcgccacatgggctctcgctgccctgttgaccaataccttccaatgcacaccggtgcaatactactacgataaggatttggacggacattgcatgcccgggcaggttcaattcttccaggccatgggatcgatcgcattggttgaagatgttatcattctctgtctgccaattcccgtattttggaggttacagatcaaccgtcggcagaaaatagcattaatcctggtgttttctctgggtggactgtgcgtgactccctccttccaaatgataattcctttccttctaatgatatattgcagtgtctgtatcttcagtctgatgcgcctgattgaattccgcgaattccagctcaccgaccttgcgggtgcgttcctatccccagctcgtacgatgattccaactaacatcatccagcctcaagcgccaaagaatccatctggacttgcctggaactcgacgtcgcgatcatttgtggctgtctgccgtttcttaacccacttgtgcaaggcgtccgcaacaaagtcagaagtgacgcctcaaaatatcaatcccaaccttctgccggatccaacctgcatttacactcgatgcggggaaacaaaggcgattttcgagagcttgatagtgattgtggagcatcagcgaactcaatcagtcgtaatgctacgacaagtcggcagagctcggatatggagaataataggcaggatgtggatggacggtccaacaatatcaggccttcatgatttttattcttaataatacgtatttcaattccccaatacatagtttcaatacttctagatatctcttacttcagaactctctcactttagatatttctcaatttagtatctcgttgtagtatcccatccttcacaactcattcttaagcccacatggccttgaacttgttatcaaactcggcgtgcagttctttgaaggccttggcaaccaagaacatggatcggtaagaattatccactggctcttgcgtatttttagagctgagcccgttgctcgcatctttggaagcattgatggcttcatcctcaatttcatcatcttcatcatccatctcatcctcccagctatcaatcacaaccttcttcgcccggggccgagaggtggggacgggggcagcagacgcctgcttgttgtctagtttgacgtccatctttccagcattttcagcctcaatctgatcaacggccttatcatccacgagattttcgtaatcgtcgcctccgccagcaacatcgagcatgtctgcaccgatattgcttccaggcttgaggaagccctcaatgctagtcttaatggtagccagagtcaatgagaagtcgttcagcacaaaccagatgtctccgcgacggatgcggtttgcagtctccaactgagaaacatttccgtgcttgaagaagtcatacaggtatgcattgagagggatggcgttctcgttgggatcaacagccacatatggaatgacggaatcctcaatccaaacgccactgcgaaccatctgactgagttcgaagacagtactgcattggtctccgtttcctgaaagggcgaagaatggtgatatgattgatggggagatgtggtcaaactgcgagaacccgagttgctcgcaggaactttctccaccgcacttgatcccactgaatggtagcgaacagtctggttccttgatatgctgctcgacaaaagtggagaaatagccagtgtagacatctaggacctgtctgttgtgagcacgtagggcggaggctgcttttctcggtaaaggtggaagagccacgatcgaggaaggcttcttttccgcgttttggaaccgttccaaggtggactctcgcaggggaatacgcccgaaaaggtgggccatgaccagcatcagagtttcaagagtcttttttggctttgtctctatgtcctgacagagatcttggaggtatcccgaattcagtagggcatggaaagcaaaactagaattctctgtgtagtacagatgagagatacagcccgcaaaattcacagccatacctgtactgctaagaagattgtttcgtcggaggtattcgatagagaatcggagatggtggagcaccgtctgcttcatctcagggccaccgaggtgaatgcgagaacttgagaggatcgaattgattgatttcacggcagacggagcttgctttgatccatatagcaagatgaacaaccgtagaaccaagcttgtcgtaatggggaaatgtccactgagacttgggagtctcgaactcatcagtcgttgcaccttggatggtgggacctgctggaaaacaacatttcccaggacatcgaatccacggcgacctgctcttccggcggcttggcggaaattcagggctgtcaagaaaatggaatcgcctgaaaaaacgactgtcttacaaggcatgttgatacccaaagccaaagttccagttgcaataacgacacgtaaaaagcctttcctaaagaggatctcacaaacttgacggtacttgcgattcataccagcatggtggacaccaattcctcgctctagggcatctatcaaccattgaggcaccgagcgccactgcaactgcttggaataaacaaggaactcggaagcgggtactttcttgaagtcagccaaatggaatccatccacaggcctcttcggatcaaagagatcaagccagccgaaatcggtagatgctgattctttggcttgctctgccttggaaattggctcttcgtcagcgtttccacttgttttcttcttggtagccctttcaagcttcttctttgctgacagcttggatgtcttccatacttcccatttggcaatcttggatttccataccggactctcttctttccattttgtctcggcattttgtagctgtgtcaacagcgattggcatatatcttcacatctaccgcggtcataattgaagaatagcgcggggagggcattctgagcgtgtaacgaggcgatcaaagggagggttgtgtcgaccaggttcccgtgtagggtgccagataggccattcatccgagacacctgtttcgataagtccttttctttctcgactacaaaccctgttgggtgttcgagatggagtaaaagtgtctcaaatggagattcccggtctttcatccactcccctaacaactttttcagttgtccctgccactctatgacatgtactttttggatgacagtattcgagaaaaagatggatggatccagagatggatcaacagggaactgctttgtttgaaggtccttcattgctttccagagggtgaagcagtcacgtggctcaaagtcaagatcatctggtatcgatctggtgcggtccaaaaggctagtgacaggatgaacgaacgtcatatcatctgctccatcgaggcccaaacgggccaagctaggagtgctggaaaaccctttgaacgagaagtcaccatggggctggtacacgtacttccgcaagtccgaataacggtggtgatgctggatcattttgaggtcaaatccattgcttctctgggcaaaatcaagccagttgtagaattcctggggatttccgacggtagccgagagtgctataattgggcatggggacatcagaagcagttgttcccaaacgacaccatcatcggcctggccaatgcaatgaatctcatcaaaaatgatacgcctcaagcggggagtccatgcattggcgttcgagggattaagcagcatgatctgaagaatctggggcaccgtgatgagaatttggcatccctgaggattattgatgcggtagtctcttgtgtggatggcccaaaccgatttcccgctggttttggctgggaaggttttggaaaatcgggcttggacctcagctgcgatctgattgacaagagcttttgtgggggcaacataaacaagaattccatcgttatcttctttcaaaatctgtctcatcgcatagaagctgacgaatattagcataactctcaatcaggaaaaattgcgacttacgaaataaatgtttttcctgcactcgttggggccacgatgaatgcgctcttctttgcatcgatctggtccagaacttcacgctgccagcggtcgggcgcaaaatcaggcgtccgggagtcgggcaatgagtctatgctgcgctccatgaaaggcccaccatgtagaagctggaattcaactgggctcatctcaatactcatgctgggtgctgctttaggaattttgaacgccgggaaagatagtttctgttcactatcggcatgaagctgggcagctggcaaaccaagtacttcacagacagtcgagacatatgcgacaatatcggatgagataccctgcttgattttcacaagagaagttacgatctcccaaatgcgtgtcacgatcaacatatgctttttattctgcggatttatgcgttcgaaaaagagaaggcgtagcaatgtatcaatcatgcaagtcagaatttcgggctccagaacctgtcgactgtctttaggtagactagttaagtatccgttgagcttcgtaaaacgagtcacaagatcatcgatgagagaaaattcgtcattgtacacgtttttccacttctgtctctgtttttgagtgacttccattgctttttgatgaacgaaagctgcggccatctctttggtggatggtttaccagatttggagtgagatttcttgtctgatttcgaggtcgtcgggtgggttccaacgtctctgcttgccgaaggagtttggtgagacttctgacgtgaactactggaagattcgacaacaatcggctctggttgtgatccagagagacttgcagcataatctctcatctcggccataaaacgctggtttcgtttgtggtttcgctcaacctcttggggggttaggatgactttcttttgatcaaggggcctggagctatgccagtggctatcttctttgaactccttgaaaacttgcgaatcactcttcgcatcggcagattcatcgactacgagctggacaggctccagaattttatcgaagactgcattgctaaatggaagcaccttttcaaagccatgataaggcttagagataattccgtgagtggtatgttccaagggagcgggagctcccccaatcgcttcacattgcagtgttgttccacaaatgcggtccaccagagacgcaagagtgttgaacggggattgtgtggccgatgaaattactgtttggatgccgagtttctcgaccatccactggactccgaagaacaatgttccgtccacgaggtcagacaggtcgcaaggtaggctatggtcgctcatttctttctcccaaagcttcgagctgagcaaagcattcgcggttttcacgaattcattgaaaaacttcaagtttttgggtacagttgttgtttggattgatcgatccgacagttgcgtgttttgtaaaagtacaatgtgcaaaagcatagactgtgctccaatcttattttcgaggctatccgtcacgctacccaaaagcatggagctaagcgtagcaaccaccagacattggcgctgcgacagctcgggcttctcaagaagtgcctgttgaagaaagttatctgtttgagcctggtttgacgattcgtttttgatggaatcgtagtccagcgcatcctccgcttggtcttggctgtcctcaatatccaattgggagagggaattccacaattgatcgggatcgtctgtttcagggccagtcgataagggattcgtttttatggagctttcaatcaccattgccatgacctgcgtatattgtgagtacagagcttggtcttctgcagctgaaaagacctaccttggtgtcacggaactcaagactattgatgagagcaatgttgtatccgtggacaacgaaccagtagatcatcgcgcggagcttgaaccttgagatctcgcctcgcttatcgacaaaagaacctttctggtcaccatcttcgagatcgctgctgtcagaatcactttcagaatcgctgctgtcgatatcactagcaatatcatccttgttttgctcggaagaagcaccatcgtgacacatgaacaaataggcccccgaacttatcagatgagctttaaactcatcggactggaagttatcaaacctcagaacctggaagtatcgcgatggttggacgcgaatagacacaagatgctgtatgatcgcctctcgggcaaggaggtacctcgcgtggaggtctctgtgagctcccttgggaatgcataatgaggcattctcggcgaaaaagacaatctcgaagaaacacttgcgctgttgaagcttttgtaacaacttctcggcaaggtaagtcgcatgcaagacctggaaaccagggttgaaatcaagtttgtcgttggaaaagcattcgagcagaagcgaatctccttcgattatgaaaagctcgtcaccaacaaagtcaccgacgaggtcaacgacccgagagtctaggttattgtacctttgtttaatcattagtaaaatcgagcgaagtccgaaagctgcaaagccagtgctcaccaatctagcacaacatggcgatccattatcttctcaatatttgcgggggtcgcctagatggctggatataaattagtagtgtcaagaccggaggatcggcattttgagcgacgaacaggatgaaccaggtaagctaagctagagcaagggaaacaatgtgtggcacaaagaaggagaagatggtaaaatagaaatttgggatggccttcagggaaaatatgaaatgcaaacgttcagaaggaggggcattaaacaggatatattgggaatgtgttgggcatgtgctcagtcgactcaagatccaacaaaccgcttacctatgatattcagtgtgatggggctctgactcattgcctctaatactctttttggcggcgtaaagacagtatctagaatagttgggctcttgatttctttgggtttacaattgtgaagggattttgggcagaaaagccaatgaccgccttctccagtatacgatgtacggcagtatacaacatccaggatagatcaagagcagacatccgatatttgatatttgtgaaatgtcgaaagccatagcatgggccaagatattgtatattcttgtagcattttcgggggcttggcaatggactccgattttgttccgactgggtaactcaaaagcccacggaatgcttcaacggctagttggaagcgtaatgcattttattttcctacttgatatgatttgataaatatttcgagacatccaaaggctccaagttccacaaaaaattatgggcagttataagtcacaagtcaagggatatgtgtgatatttctgttaataaagaaataagcaacgcattccttctctcctgcggctggttttcatggagatccccgacagacacatgacctcatctcgcggcaatggattaactgaattcgatttggctttgcgaagaccaccacgaacaaatagtgcaaagaaatgagaggggaaaaacgatacacgcaatgtccagactcccatcaaccgtcccaatcacccaattcccttgggaataaacgccaattcctcgctaggaaggtactcgtaaacgaagcacacaaaaaaaaaaagacctgttaggaatgggccgcttgggaacattatagcataccggcgaaacccacattcgtctcgtgtccgaagccgctgcgaaggctgccgaaatctagtttcatgagcagacgatctacccccgctgctttatggggcacgtaatgactgaacccggggctcgtgctgtcatcaacgtgccgggaaccaggccacatatgaccgaagttcgttgctagttccacgggtcctttgccttctcccgagcgactatcgtcaatgtcccgcagggtcccaacgagattcttaatacccgtctcgacatcgtttcgagtggtacgtaactcttcccatacatcgcgttcttcctgggcataatccaccaacgcgtcttccacgccttcatctgtttctagatccatgttgcgttggatggtttccaaccggatcacaagggcgacgaagcggtcgatatttgtgagtagtcctctcatggtgtttgtgaagggtagttcagtcaaaaagagggactggaccagcgatgacaagtgccgccggtgtgcaaccgtgagagcctcgggatcgtgccgtcccatggtctgttggccagactcggggaagtctctggtcggaatctggttaggagacactgtcttggaactatgctgcgatttagaagaggatgcggttccaggtcgggacccaggggctgatgctgtagatgaagagcttccttcaatccattggcgaaggtgctgccacgactcattgacaacatctccttggaaaaagccaccgatctcggaaagcataaatagacatgcacttcctgtggcccagatatgacgcatttggcgaacacgggcattatctctatctcttcttgcctttagctttgcttggccaaagatactgttgcttctgggcggtccccatggcgtagggtagtttcgccgcaacggagttcgtttccaaagatccccaagccggatttgagcccgccgtattcccaggagataagaatgaatcttagaatatatgacaatatcagagctcgagatgaacaggtctagaggagctcggatatgtgaagtgagggttgtcggcgtggggaagagcaggtcttcaaatgagacctttgagattttggataataagttgggagtttgggcaggcgtcatcggtcggccacttttgcggccactgatggacagagaaagaaggtcccgggcaagttcaagttcttcgtcggccgggtcctcctccttttccagcgagaaaagctctgcccatgcttcagctagagcagctgtgacatcaccttctttgacggtaaggacgtcaggttttcccaaaggacgagtcgctgatgggcctcggcgtcggctttcctcaatgcgggaatctgcatgtgctacaagagctaccgcaaactcccctcgtcctagtaaaaggaaattgtgaagcaaagtaagaatttctagaatttttgggaggggcaacaatttcgacaaggttgattgagaaagggaaaggcgaatggagtcaacggcggtagtcagttttgaaggcgaaattggtgatttcaggcctgcaagttgctcgatgtgctcccgatataacgtaaccggcgcagtagaggttcctgctattgaggttttccgtttcgcccggatatgattgagagatttaccaatgaatagtattgagcctgctgtttgtgctgtgacaaaatttgggagcaatcggacgtttatgctgaattgtgcctcgtcattctccttttcggtatcctcttggataaaaaagtcctccttcccgtagatgggaagattcccataaagtaaccacatcgaaagctgtttcatccatgctgtctcagccgttgtcgctaattgcagggccatgtctttgatatcgagatatcctgtttgagcttcggtccgcaggtgatctatgagcgctgcccccgtggagccatgcaaaggttcggtgtttttcctttctggttgaatgaaccggataatagtccagagccattccatgcgccgcgtccatggtgcgaactctcccacgatagtcgacaatgggacaataccataccctccgacatatccgctgtcctcggcaaggattgccctctcaacctccaggatcttcttctggaattcacctagatgcgttccaataacagctgtggagactgagcggcatataactgatggactcgcagaggatatatcggaggcatatttccgcagctgcgcgtggagtcggcttagatggacaacggaggcgaggagagctttctccggaggtgaaagaaggggaaagtcatcttgagcgacagaattctccttcctttgtgtacggaagaggagggatggctggccggagagggagagtaggatctcatggagcattctgacgagagttccctatcggatccatatcaatcacgagctcatcacaggcgtatatgcagataactcacctagggaaattccttctctccgttggaccgttcttacgctgccagtataatagaccgcgccccacgaattcaaagcgacacatatgataaagcgtttgacgacgccaagcttcgcgttgacgccgaggcgcgtcaaacgtgacgtgtgaaatagtaggcttcagaaccaatcggagaagatagaggtggttttcattctccagagtcgaccccaatattatctagatatcacagcttccaactctcaacaagacactctgtgactcgagaacagtagctcccatggaagaatcgcggggcctaaaggccaatcgtcgtctcaccgcccgttagtcatctcttagctgtcggcccctcttacgtcggtccctctctcgatctctctcatactctttactgacttgtcctttacttattcgcacctcctaccttacacagtgttccattttctcttttctttcataaacctctatcgtccgtcgattgcgctcggattttgctactcttctacgtgctcgttgagctaggtacctggtacgctaggcgttgcaacttgatttatcatcactattgaaagacttgctctatcgcaaggctttcacctcctgactttcatcattccttcaaacattcctgttcgagacgcggctaagcccggaaagcgcagagcctctgaacacgacgtcgtcggagctcggccagagaaaagaaccatgacggtatgattagtcttgatcttagagataagattgccactaatatatcttaccaaaggacattaaaatgcaggtcgagaacccccaagaaaccatcgaagctatcaagcatggggagatcgacgaatcattgtatagtcgacagctgtaagccccccgcatccctcttatgacatacagatcccgagtatgtgctgacaccttagagatacgttcttggtcacgaagccatgaagcgcatgggatcttccaatgttctgattgtaggtctcaagggcttgggcgtggaaatcggtatgtgattcaactattaatcaagcctcgatttcatcccgacgtctgattgtctccatagccaagaacatcgccctcgccggtgtcaaatccctcaccctatacgaccccgcagcagtcgctatctcggatctttcttcgcagtttttccttcagccagaggacgtcggcaagccccgtgctgaagttaccgccccgagagtcgccgagttgaactcctacgttcccgttacagtccatgagggccagagcctcgtgggcgatctcgaacgactaaagcactaccaggcagtggtgctcacacagacacctttgaaggagcaactggtgattgctgacttctgccacaagaacaacatctaccttacaattacagacacattcggtctctttggttatatcttcaatgactttggaaagaacttcactgtgggtgatcccaccggtgaagagcctgctggtggaattgtggcggctatcaatgaagaagggttggtttcggcgctcgatgagacaaggcatggactcgaggatggtgactttgtcactttcactgaagtcaagggcatggatggcttaaacaacagtgatcctcgcaaagttactgtgaaaggtccctatactttcaccattggtgacgtgtctggtctaggatcctacgagggtggtggtctattcgctcaggtcaagatgcccaagttcattgatttccagccactagaggatcaacttaaaaagcccgagcttctcatgtccgactatgccaagtttgaccggccacaacaattgcacattggtatccaggctcttcataagttcgcggagactcatgatggccaattacctcatccccacaatgatagcgacgcccaggaggttctgaagatcgctaacgatcttgctgctactgatgaggaaaaagtcgaactggatgagaagataataaaggagctgagctaccaggcccgcggtgacctgaacccattggcagctttcttcggtggtatcgccgcccaggaagttctgaaggctgtctccggcaagttcagtcctattcatcagtggttgtactttgactctttggagtctttgccctcatcagtcactcgatctgaagaaagctgcaagcctcttggtacccgctacgatgggcaaattgcggtgtttggcaaggaataccaagacaaacttgccaatgtcaccgaatttttggtcggttctggtgctatcggttgtgagacgctgaagaattgggctatgatgggtctgggtacgggtccgaaaggaaagctttacgtcaccgacatggaccagattgagaagagcaatcttaaccggcaattcctcttccgtaccaaggacgtcggcagactcaagagtgaatgcgcgtctgcggccgctcaagcaatgaaccgagaattgaaagacaagattgtcactcttcgtgatcgcgtcggtgccgacactgaacatgtattcaatgaggatttctggaacggccttgatggtgtgacaaacgctttagacaacgtcgatgcacggacatatgttgatcgccgctgtgtcttcttccgcaagccattgctggagagtggtaccctgggcaccaagtgtaacactcaggtcgttcttcctttcatcacggagtcctactctagctcccaggatcccccggagaagtcattccctatgtgtactctgaagagcttcccgaaccgcattgagcacaccattgcatgggcacgggatgtcttccaaacctacttcgttggtccccctgaatcagtcaacatgtacctctctcaacccgactacattcagcagaccctcaagcaagcgggtaatgagaagcaaaccttggagcacttgcgtgacttcttggtcactgaaaaacctctaactttcgatgattgtattgtgtgggctcgccaacaatttgaagcgcagtacaataacgcgatccagcagcttctctacaacttcccccgagattccaagacatcatccggtcaactattctggtctggacctaagcgcgcccctacacccttgaagttcgacagcactaatccaactcatcttggatttgttattgccggtgctaacctccatgcgttcaactacggcatcaagaaccccggtgcggacaaggactattaccgcagggtagttgatgacatgattgttcccgagttcactcccagctcgaatgtcaagattcaggccaatgaaaacgaccctgatccgaatgcgcagccagctggtttgtccaatgacgaggaggaaatccagaaattggtcgcatctcttccctcgcccaagtctcttgctggtttccgcttgcagccagttgagtttgagaaggatgatgacaccaatcaccacatcgacttcatcaccgcggctagcaacctccgtgcagacaactacgagatccctcaggcggaccgacacaagaccaaatttatcgctggaaagatcatcccggcgattgccacaactactgccctagccaccggtcttattggcctcgaactgtacaagattgttgacggcaaggacgacatcgagcagtacaagaacggctttgttaatttggcccttccgttctttagcttcagtgagccgattggtagcgaaaagggcaagtatcaaggcaagcaaggcgaggtcacaattgacaagctctgggaccgattcgaggtggaagacatccagcttcaggagttcctcgacttcttcgccgagaagggtttggacatcaccatggtcagctctggagtcagcttgttgtatgcaagcttctatcccccatcgaaggtcaaggatcgccttcctctaccgtgagtatcttctcttctatagctagccccatgcgtgagttagattactgacattgtaccttgcagtatgagcaagcttgtggagcacgtcagtaagaagccagtccccgagcatcagaagaatataatcttcgaggtgaccgccgaggaccagacagaagaggatgtcgaggttccctacgtgatggtcaagctcacaaaataaggcgattagaatctacgaaaagccggttggctgcatattgctagtacaataggtagatttcatgactattccactctccacagactctatatgagtacaaatatgtgtagaatgaccagtgtaaaccacctgtgtacaaatcaatatcaaatcgctcaaggctgtgccaagaccatccagatcgctttgtcaaagctgatcgatcttccgataagcaaatctgactcagcatttggtcatgcccggggacgtcatgaccccgcgaagacgacatttgtattctttctatatataagagtgaattccactgtgtctgccgcttatgttctttactcttctgagatcccaaccattgaagtgtattctacgcgcagggcctcttcgtacagttcaccatagctttgtgttccccacagtaccaatcatctactcccgcaatatggctgtaagaaacacaaaacacggccacaacagctctcttggctacgctaacttatatttcaagaccgtaaattccatgaaaatcaccgattgggtgaaacccggcgacaagtcgggcgagttcaagcgtcagcaatccatctttcggaactggatctctagggaggctggagcccaattccctccagagaagggccggtaccatctttatgtctcttatgcctgtccttggggtatgaaagaacttccaattgactggccactcgatcggtgactaattatctactagctcaccggactctaattactcggaagctcaagggcctcgaggacatcatctccttcacttcggtgcattggcatcttggggcagaaggtcaaatttatctcatgagttgtggggaaatagcattgttctaactcatatcttaggttggcgatttgctactcccgatgagaaactgcccggggagaacactattcccgatcctctacacccagacttcacccatatccgacaagtctatttctccaatgatccagactactcgggccggttcaccgtcccagttctcttcgacaagaagaccaagctgatcgtaagcaacgaggtatgaaacaatcttcccaaagaagacatttccaatttcatattcttacaaaaccagagctccgaaatcatccgcatgctttaccatgaattcgacgatcttctcccagaggaatacaagaaaatcgacctcttccccaaggctctacaagccgagatcgaagcctccaacgactggatctacaacgacatcaataatggcgtttacaaatctggcttcgcgaccacgcaagaagcatacgagaaagccgtaacaacactcttctcctcgctagacaaggtcgaagatcacctcgctaagcagcaagcagcctcgaagccgtatttcttcggcgacaagatcaccgaggctgatatcagactctacaccaccatcgttcggttcgacccagtctacgtgcagcatttcaagtgcaatctgcgtgatatccgctccggattccccgctattcaccgctgggtgcgcaagctgtattgggagatccctgctttccgggatacgacggacttcgagcatatcaagttccattatactaaaagtcacaagcagattaatcaatttgctatcacacctctggggcctgtgccggatatccttcctcaggatgaggaggttagggctgtgcaggcggctgaataagggtttggcctcggaaagggtgcttcagcgattatgcccgtttgcgactcgcgaactgaacaatctaagagcaatctgagtgttatctcaaagtatgtatttgtccaaacgtgcagatttccttgtaatagtaaaaaaaaatggggaatctaaaagtcccgtggtattatatcgacgccttgccatgctgatgtggttgatggtgagtttcccaatgcccctgtatcaaagtttggtcaaaagtacagttgtctcaagtgagcgcaacataagcaataaagtaataaaagttacaatgaaaccttgttgatatatgcagaaaaaagtcaaatatcgtgatcgatgatcgttgatatggcaaagagatcaagaatgagaatgggatgcatttcagatgcacccatgagccagggggtggatgtgccatgcctttcaatggcttgtgttgtgggtatattgggacaacgcttctaaatttcaatccagtaaatagcaaagatcaatccgaaggcaccggaatgaatgcgaagatcgagaatccacgcaaatggctaggtgatgtccacggggatatgcaaggaggaagaggaagtgagggcttgttggggctggcagatcatcgtaggccgagaatgcgtttcgcgttctcgtagaccacgtagctgattgacatggccggtgccactttgagaagattaggtgtgagacctttgtaaagaccacggggtccctctgctttgagtgtgacgcttaggacttcaccaatccctgtgtatgtaggcggatgcaaaatcgtgccttgagtttgaagtcgagtgcggagaacattgagtgggtagacaatcgaggcgctgaatcctccactcatagcaccaattgcacctgtcgcgaagttgccgaggggaacgtcatcctcatggcagccacagtcacgagcctttttagctatgagtgctcgtttgaggtattcaaatgtcgatagatcgattgcggcgtaggggaacatccccacaaggccaagcggtagtcctcggaagaagccagccaagccattcttattccatacctttcttgcggtagctgcgatgagttgattgcctttcgggccacctttcacggtttcgcattgcatgcgactattgataactatgagccacaatgctctcacaactcactttggtcgatgtactcacaattttagggtatcgagggggtaaacaaaacatctagtcacaatcagaaccgacttgcctttcatagataacgcgcaagacctactgggcaaccattccaccaaagccacccgacatgaactgtgaagtgggacgaagtcgcttgggatcattgtgtccttcgagttgtgcaaatgctcgtttcgcagactgttctctggtcagtattcgtctagttgtgtaggcgaaatcgaatagcaagattacaaacctcataggcaccaaacttgatcgcagactctggcataacctttaccacgttcaagccattgcctacttatagttagtcgctgccacttcgagtccaggttgacaatatgacaaacctgcgaacaaactccgtattcctccagcccgccatagttccttgagagcgccgaacaatgttctgggatcgttccccaccgcagtcaacagggatccgtccttcgccgcctgaaccgttgatttgacgctagtctgcgcaatgagatagattttgagacgatcgaggggggcggtggccgtccttgacacggcacccgccattccacctgcaaggaagtagcctaattgaggggtattttcggtcaacttccgtccatgatatcggaaagacatccgcatggcggtagtctggggaagaggcagccattccaaatccaagtcggcgtctagcgagacaaattcatgctcgagaacgggttccggttttgagatctggctggtttgtgcgtgtgctgaaggaaggaagggggccaaggcggggagggacaaaaagttgtacaaaacgtgttggatggccggaatacaagatgaaagaaacggatgatttgtacctaaaccctgcaggtcattgatgttgacatctccttccgggtttagattgcccgtggccgtatagtatgaaaggactgcgcgtaggtcggtcggggattggagagggaggaatagaaggaaatccctaaaaaaaagagaagggtaaatttgttagcctaggatttttcagccttcattgaccagagtgaggatgcgtatacctccactcagtgtaagagatcacgccgtcatggttcttatcgacttccgcgaaaaaccggtccaacttggcgctcgagactgtgaccccggaacgtgaaaaggcattccgcaattccatcttgtcgatttctccgtttttatttcgatcaatgctctggaacatctgccatagtccgtcctcggtgcggttgatgaatgctcggaattctagtggtgattaggattggaccaaatcttggccagggcaccccttcgccgagtgatccctaggtggttctcgtgagcttaccggcttggtcgatacgtccatcaccattcgtatccacctcccgcgcgaccctgagtaccatatcgtctgcattttttagagctagaaagagattagacaagcgcagatatatagcaagaaaccaggtccaactcacgatgatcaattttctttaaccccttctttaacccattcaggtcgatatggccctctcgtcgagtgtccaaggtttcccagagtttggcgactcgtttgtcgcgttcatcttttgactctccggatgccatgataaaaaaaattgttaccgagcaaccattattttctttgatacttcgttataagaagtctttcgagcacccaagacccctagaagttgaggggaagaagatcgaggggaacataaaagtatgacgtgaggtaaaaggtatgcccagccctggaggtgaacatggacgggtaaatgcccaggtgattaatagacgcccggcgatttgaccggctttgacgccatcggattatcttgcacgggaccagggccaagccctactatccctttttgggattgcaacctgacctcatatgagatgagattctgatgttgttgctttgtttttctctgtttcttttctattggctctgcatcatctcatctcactttaatacgtgacctgggtcagcgggacttcggaccatgtcgtgacggcttccaatttacgagcgttgcactatcaaacattgaacttgcaatatggcagccaactactgggcatcatcccagcgtcgacactggctattctccagggagaagttagcagatatccgtgaaggattacgggagaaggataaagttgcccattcgcagttcccgctgccggatcagcgactattaaatatctactttaaccaacgtaagttttatcaatatggtcattgttttaaatgaatgtcgggctaattcaaatcataagagcttatcaagctcggaaaacgcatgtccaccagacagcaggccattgcgacagcacaagtgtatctgaagagattctataccaagaatgagattcgacagacaagtccataccttgtactcaccacagccttctatcttgcctgcaagatggaagaatgtccacagcatatccgctttgtggtcggcgaagcgcgcggtctgtggccaggtatgcatccgtatataaagccataaaaacagatcatatgctcactatatacagaattcattaccccggatgtggcaaagctcggagaatgcgagtttgccttaatatccgaattgagctcgcaactcatcgtacatcatccttatcggactttgtccgaacttcaaaccgaactatcactcacctcggatgaagtcgccctcgcctggtcggttatcaacgatcattatctgacagatttaccccttttacacccacctcatgtcattgctatcatggcaatcatcgtcgctgtcgtattcaagcccacccattcatccaactaccctggaaccgggcaatcggctttggcaggctctatgagagatggaggcggcatgcagatgctggccgctttgtcagataagactggatccggtcctcctcctaaaattcagaagcttgtcagctggcttgcagaaggcgaagtcgatattaaagctgtcatcgagtgtacacaagagctggtctccttgtacgaggtgtgggagcaatatagcgagaagaactgcaaagaattgcttgggcggatggtgaagagcaagaacttggacaaatgatcgtgtaccgcatcctgtactttacaaaacctttatataccggtatctcaatattcctaatctagttttgacggggtttttttcctttcgtggacatttgtcatttttcattctctctctacctagcagcatacgactggtaaaagcaacccgctttctttatattcggtaccccccgcatctcgtcttaggcaatcatgagacgaatccaaggatttcgacgcgatggtgttccaacagaaagcttgtatgagagaaaactggggggaatgcaaggaagtggtttaacaagaaacaatcagatgcttaattgggtctaatgtgtctactataaaagtattcaaacgacgatgataccaccgaggtccatcggattgcatagttcgagcagacggggattccgtctcatcgaagctaccagtgccaattgaaacccaagatacgggctttgatttaagaattaccaaatagactgtacagcgaagaagagaaagacgtgaagaagaggaaatggagggggggtttatactcgcaggtggggatgtcgtgccatcctcgcgcctgcccaatccatggacagcttcatggcagccatagatcaccatgattccggtacggcaaaatggcatatcacataggcatggccctaactccgtactggattcaaagttggatttgagatcttctaggcaaaggaagcggttattcggcgattgagacaagttgaacccttaagccaagaatgaggccctttgaatacctgcattccaaatatcgttttattacactctgagtaaagagattaaatgagtatagaaatgctaattacacacttaactagtcagttaggtgtagcattgtgacctgacaacctaagacatacatcttatcaacagggcgactccaaaggtctctagggctgcatggaagaatttctcaagagataaacttaatcgaaataagaggtttgtcttgctgtcatgctgtcattctgtcaggatggcatcgactccgcaaatctatttcaataccgcccagagtctgaaaccaccttccgactcggagcacagaaacattcgccacgatgcaatagatatcacatatttaaaatccaaccagggcactggaatagttgaagatcgtgtttgccagtcccttgcgcggtgtatatggggatcggctcgcaggaataactagtccctcaccgaattacatatttcatgcattcggaccccacgatctcacacagacaccaaatcatgcgccctgcatagacgctggatagatcagctgcatggttcaagcctcggggcaacgtttacggggtacaatatgtgatctatcctacacctcaagagatcctgttccaatagccagaagggcggtgaaaccgacaactggagagccagcttacggtggtacgttgtctctagtaaagatttttttcggcgccgtgtaatcgaattgaagttatcactggtggaagatgaaaggtcggcacatcgtgtcacagggttatgtcccagtaggcgccgagagagtgggcatatcccaatgagggacaaaggacgaaaatacatacaacgtaggtaagtgaatacggaaatagctcccagacctaaaatataccacacgttgaatagtggaaactcacagttgattttgattcggtcgcatgaatatgtagtgagtcacggataggcaatggtacccgaaagaaaacaagagaaggcgccttaagcctctgccctagtccggattccgcattgatgaaccccgatttgggaaggatgtgagctgataaggtaagatctcaaggtcctctgccaataataggcgggtttgtctgcagctggttctatgggtgtgtctcaagaccaacaaggtttttttttcgggtctttgcgctgcgtgtcgaaggattggggaatttgtacggggagccgatcccaagcaagatcagcagccactgccgattcggacaccctatagggggaatggagggggaatgtgcctgggaaggttaggtcttgccctgcacagcctgcagctaaggggacccgaagggctgacaaaaatttcagcttccccaaccaccccccgggttgaggaaccttgaacggaggatggggaatttacttttccggacagcttcactgcatattcgatgatacatcatctgtattttgtccaggtcggcagtttggcggtttcggcaaatgtcggatctagataaaagcaacaatcatcattgtcgtacggagtagggcaatgctagaggtctccagatgcgcttggtatgtacacaacgtagtggcgtcactaagagatcttcctaatcgggtaaggtcccaattgtcgacgtcacgtttttctttttcagtattttggtgggccgttggagactccacttggggacgatatgcgggctctcattggtccatgggctattgccactctggctagcgcttcgatctggttggtgcgtcgatgtaagtgccttttccgccatgacaataccaaacggtaattatccacattgtccacatcacacacgcagtccactcccttaaatagtaatggtaatgaccgtaaccataccatcccccccatagcacacccctcccctctttttcccttcgcctcttcccacacacttctcattctcattaatcctcctttcctcgttcaatctcatcgatctttcctatattttctatatttttctttttgtaactttcttcttatcttcaatcttctcactttcgagtgccggcttctcaatacaatgtctgcctacttctacaaccaacaccagcaacaccagcaacaccctcaccatggtgcccatatgcagtctgcgtcaaatacccaccatgggcgctctcgtcgtgccccaaagatggcctcgcaaaatcctcagcgtcagttccgaggagtcaagagtatgcgggaattggcggaagctccggctgtgacagccttccgtgcaagattcgaagctggtcgatcctttgatctggatgacgacctcgagttttgcccaggcctcctaaccgaggatgatgtatgttgtgattggcgaattttcaacccccttatattcgtcacccccttgaagatcgtcacagatctcaatttggatcgaccattaggggcagttttgttaacatgcttgatttatagctacactccatccactccgcatccgatcgttcttctctctccagcggctcaccggacacctcgcctctgcagcaccaaatccaaccggtgcagcaggtgaccccgtccatctcattgtcccccgctcaaaccaactcatacgttcaccctggtgttgccggcaaccctaatcatgtcaactaccagcagcagcctgcgaaccggacccgcaaggtcatcccgattatcaacccctcaaccggaatgaccctgtcaagcccaccttcatcgatctcgtccgcgatgatgcaaactgctcagcgtcgatggtaagggtgccatttgccaaagtcgtaggctggcaccctacatctccattcgtccattgcacgtccgttgtttaagctgttctgcatcatcggggtcccttaatcgcaggtcataatgtttcttttttttttcctccacttgcattcttgttcgatacgtctattgcattcgacacgacacacaacctggaaaaatatctgttccacgaatacggcgacaaaaaaaatcatcaaaattcaaaacaaaaaaaccgacctgtacatacactctcctcttcgccgattacgaccaccttcgcctcatattccacatcctttgcgatactcttagcttgttgcgagcgacggcgcctgcgattcaataccttgcatccttttcctacgatacctctttcgtctctcagggagggacgaatactttcttcggcctatgtttcttttcttccggtcgggccaccgatgatgtacagaacacgtgcagtgacattgctacttgaagttgcatgttcatgacttttggagttgattctaccttttttttttgggagggttttgcgtgcaaacgactttgccagatatacacctacgctgtggcactttattttctttctacgatctctttgtttgggtttgtttttaccggggcgggaatggatatcattttcaaggatctagaggcggaaacgatacacgtctgcattgcttgggcactgttgaatatcttgggttgctttttattgctttgttacagtctacttttctcatcttttacggattgtttctctgtacatggaatttggggattggtgaataacgcttccttgccactggtatgtggtcggttgggtctggtagcgaaaccattggatgcggagttgtttctgtttgaaatcgatatccttgggggtctctcgcggtgtgcgagtctagaccgttatgcacttaaaatgctttcattattacccttctttcatctcttccattagctctatatttcttttattgccctttttgggaactcccggagagttatgacattgtatgatgttgatttgcgttgattttgcatactatcaagtatcgtcttgggagtctggctagactgggacgttgtagattgtacttgattcctgctagacatgtagatgcgtctccgaggctcaagccttctactccgagccattccaacaccaaacacagccatctcaccgcacaagtctgtcactcattaatcgacttggttcagagatggtattccaaggtcaggggtgtggttctaaatttccttttccttttcttcatagatccgatcaaaacttctcatagataatatatcaagtggtgcttggaaaatatgtaagaacatgtatatatatggtggacaaatgcctcgctttaaagaaatacccacggagtactccgtgtgtctactaggcctgcgttccttaaactataaaactaattacccaaagtcatgatcagatctctaattaacattggacacactcaacattggatcgcccgaagatcaatatgagccaaagataccattgttctatgccaacgcaatgccaccagagaagcaaaactacaaataaaaaagcaagccacacttaacatgtcacaatgggaaatcttcagtgttttaagtacggcgtacatcccatgattgggtccctacccgctggcccttgtttcaggatcaaccaactatatcccaccaacaggcctttatttcctctgccacttcttggccttccatttccatcttagtgcccagtacctatgttggaagtagtatcaaacccacgcgcccaggacagccctccccacttatctgttacggagttagtagggtactccgtatatagatatcatctgcgactccgtactatcctatctgcgactccgtactatcctatccggcgctacccccgagccccttacctagacctgacacatccccggccccacggagtatacgtctttctagtcttggactgatggcgtctactgtgaagcatgcccagcttgtgctaagggctctgcagcgcagcgcttgcctccgataggttggtttcgaaatgccaagcgctcagaagcaaacgcttgcactacaagatacgtgctcatttcgggtcgttcttgcctttagggtggtttcctcctatgaagtttcactttgtcttgttgatattgttcttatttttgtttccggtctctttgttttcctctcttctcttcattgtccgcattgtctacattatattgtactcttttctttcttttccattcttggccgcaggtattcaagtcaggactactgcctgctgacgttcattttgagacattggcattgtctttccattcattcagaacgagcctgctcgtacagatctgctgaaagttcaccctcttgtcttgtctgttttttttttcccttgtgtttcctgtccattgcattctttaatatcaagtcttcaggctggcctgatctaatcactcctttttctttccatttccacccccatattggggctttgagcaagatgcaattcattctttttctcgctgccttcttttcgttgagcttcaatgctctttccatgcccgtggctcctccgaatcaccttcaaggccggtcctttaaggtgcagagagtcaagcgcggtgattatgttcccaacggacccgcggcactacgcaaagcataccgcaagttcggaattgatgcaacaaccctcaatggggtggacgtgagcgacttccaaccttttgaaaccacggataccacctctgtgaaagttgcaaaggaagatgtagcagatcctgaccagacgggcaccgtggatgccacttctgttgatggagatgtggaatttgtctcgccggtcaatattggaggtcaaaccctcgacatgaattttgacagtggctctgctgatatgtaagttttgtgtttattggagagcaacatgtttctatgttccagttcacaaaacgaatattccgagctaaccaattgtgatataggtgggtgttgaactcgagacttccaaagtcactgcgaaacggccgaacagtgtacgaaccgagcaaatccactacctttgaagagctcgccaacagcacattcaatatccagtacggcgattcttcctatgccaatggtggagtaggcaaggatgttgtttcgattggcggtgtcaaagttgccgggcaagcattcggccttccgacggaaatttcgcagacattcgccgatgacaccaagtctaacggactcgtcggtcttggcttttcttcgatcaacaccgttctgccacagcgtcagaacacattcttcgacaatgtcgctcccaacctcgacgagccggtcttcaccgttcgactgctcagcaacggtgtcggtgagtatgaattcggaaccgtcgatccgacaaagtaccaaggcgtcatggccaatgtcagcgtggattcatccaacggattctggcagttcgactcggcacagtacgccataggagaaggccccttgcacacgatcgccaaagcaccccaggccattgcagacactggaacctcgcttatgatggttagccctgaggtcgcggaagcgtattataagcaagtcgatggcggattatacgccaataatgccaatgggtatatcttcccctgcacctcgagcttgcccaccctatccgttgcgatcgggtctggttatttggttaccgttcctggatcgttcatgaattggtccgaggttggaaccaacacgactactggagaaacaggtgagttttcttttctgtccgttcaagcttatttgaagtatgagttctgggctaacctttttttgacagtgtgctatggtggccttcagtcgagcgggagctcaaccatggcgatctatggcgatgtgttcttgaaggctttgttcgtggtctttgacaaacgcggaccttctttgggattcgcagcgcctgcttaagcaaaaaaaaatccgagatttatccgcccctcaatttgtgacaatgtacaaaaacccatgttttcatcttttcatgtgttggcagcgatgcagagaggaagaaatcccatttagacgcacaataataatacggaaactggaaatttgaattcttcatattctcatgggtatgcgtttagttttattttcagatataccgaacacttcacaccccctaccgcacagtagcattggccaagctcttaacagtacaaataccaccggaagcagcaaccagctttccaagagcaggcttaccctcctgtccatggacagcgggaacagcactgctatcaaagacgacctcacggtccgcagtggtagtgaaacccggttggaaagtctcccagatcttcttcttcgggttaagctgcttctcaggctggccatcattccagccctcaaagctaatccgctcaccggcaggagcatcagcaggcgggttaacgagctcgataggaccggcgtgcgagtcctcgccctccgcaacacgcggagacgcagcgagaaccatcgcgcaagacttgacaccgcgcatggtcacaggctttaggttgcacacagcaacgatcttacggccctgcatctcctcaagcgggatcagtccgttcagtccggaacacacggtccgcacggtcttgccggtctcctcatcgagagacgtgttctcgcttcctgggacgtcaccgcagtcgaccgtggacacgtacagcgagtccgcgttcgggtggttgatcgcacgcaggatgtgtccgacgcgcaggtcaatcagtgatggggctggtggcgcagcgggggcaggagcgggcttgggtgccttctctttcttctccttcttttccttcttgttggtcttcacgggggcgccgtcggcgccgacctgagctttggcggcttgctcggccttgccttggccgacgacgaggggcttggactcgttgttggcgtcggggttctgggcgctagccttctcccgcttcttgcgctctttctcctccttggggtcgacgggcttgggcacgaacttgacgtcgttcacgtcgatggcgatcttctcctcatcggggatcttgagcgagaataggcggccgttctgcacgaagtcgacgtgacgcacaatgtggtggtagcccttttctccggtgcgctgttcaggtgtccatttctcaacgacgggggctagaagagcatagatggcaatgtcggccaccgagggcttcgcaccgaggagggtggtacgggtggtgaggtgaatattcagctggtcgaggatctcagcggtcacatccttttggtcattggcgagagaagtcttcaggccggagacggtgtggagccattgcctgatgtcagcttcctcttcctcattcaaggtgacctgagggaagatcttggcggaggcgtggaggtagtcaggctcggtcgattcggaagagattacggcggggtacgaccgatagagaagggagaggagagatgtctcaggagctgctgccgtcgccatggtgtatgttcgtggaggggttgggagtggaagaagagaaaatcgaggaggggcacggatttgagtcaacgattggacccgcggggttgtcagtcgggcccgcaatagagtagacctgagagaattcagcttgacgacgatcccttttatatagggattctggtggaattttgactgttaatttaatattaattcaccaaagcaattgcctgatggtttttgtttcctggccgtgctgcgcttgctgactcagcggtggcctggccagcccttaattagcataacccttcctatcttacggagttcggggtcataatctgtccttccttcatgccacttacagcatagagatagacatattatcttctggcagcatgacacaatcaaatgctaggactcttccaaaactgccagcagaagcgatccgtttggctcaccttctcgatagcttctttaaaacaaacaaaacatggactggtctttcgcaccctgaccagagagttctgattggatttattgcgcagaaatatgacatggggtctactctcgcggccaatcatattacccgctatcctagaatatgggcacgcgaggagcaccgagtgacagaagcgattcaaaaaacggttgatctagcctcgccgctactggatggaagtttgagatcagttcttaaggcgaaatccatatttgacatgcccgtcaagctgatggagcttattgtgagtgatctatcagacagcgaactttccaatctttgccgagcaaatcgtgatctctacttgagtgggtggctttctcggcgaggtatgcaggacttgcgtgcatttgaacgaagcctacaaggaaatatggaataatcattcatcaaggcagtcgaagcactctttgatgtcccgtagacagtgtcgtgggatacaactccattatatgacatggtgaactacgaaaatgtcggattgatacagttcctggtttttaatggcggcttgcttgggttagaattacaaacactcattcagaccaccctacgacatatctatcaggacagagaggatagaaaggagtgcgaaccactgagaactgtttgacgtggggggctgatcccaactatcgttttcataacggctgtccttggatgtggcatgctattaaatcagcgtcggcggaacgggaccagcaccattcatggacaaagcaagaaaaggcgtgtcgggatgtgcagctgctgcttgaccatggggctgacccaaattctgtggggtctttggcgacaatggattcgatgcttcatgtagcatgcctgcattttcaacctcaaatcgtaaaggccttgctcaaagcgggtgcacaccccaatgcaaaagacgcgcgtggccgcacacccttgtttatgctattcgaagaatgctggcccaacgtacatcaaaatgaatatctgcttgatatggttcttgcagacccaagagttaagattgatgaacctgacaatgatggctgtacgcccttgggcgctgctgtgagttgtattgcaaccgtcagtcgggaatttgccaagaaagtcgttcgtatgcccgatgaagtcgatatcaattcccaagacataaacggcgaaacaccattttctcggactatcgccgtcaacgagtatgatataatccgtctactcctggcgtaggatagacttgaccccaacctcggtccgacagatgcatttccgtcatttcttgctgttcgtcttaatcaacaacagacggttgagtatttgctggactctaagcgactcaaagtcaacaagcaaactgggcagaccgctttgttggaagcgattcgtgtaggcaacacagatgtcattaggatgctcgctaaagccggtgccaacgccgatattggaatgagtgaaggcagaaccgctcgacagcagatgtcggctgcgggtacttatatcaaatggaagacgagctcgatatgaagatcaaattctactttgcttgctcctttgcttctgtgtttctataaaagggtgtttatctattgaaatcaaagttgcaccttcacagaaaagtctctagtcaatgttccgtacggcaattggaatctgatagtaaattatttgtccactttgacatggtagtctcccgatgtgaagagtggtatataaggatgtcatgagcagaaagaccttgatttaacgcatacaatgagaccccagatgaagtttccagaaattaaattgagaaattagacctaaacgattctagcaaccctgcaccaaccagaaagaactctgagtcctaaattaatatagcaataaaagaggatacaaatttgactaatatcgtcgactctttttcttccctttccctttcccttttcctcctgctctttttctcttgcgtgggtgcattagctgctcaagattgatgcccgtccgcgaaatcgtttcctgtgcagtcagacccgtgctatctcgaatgtccagctgagcaccggctttgataaggagtttgatgatatgccttgtagttggcaatgtcaaagcgagacgcccattgccatctttccggtttgggtcggttgcattttcgcttagcaatatctcgaccatcctttccattcgctgcgaaacggcgaaaaacaagggcaacttcgtagtattgagattcgggttaatattagtctgcgacagcaacagctcggtgactcttttgtttcggctcgctaccgaatgatataataccgtcctcccatgaatgtcttgggaattgatatcaacatcggaattttgaagcattctttccacaaaccaagtagagcaggctgtgttacggccagcagcaatactcaagggtgtacggccattctcgtcacgtcggtcgaggtcgattcctgtagcttgaaggaggaccttgattgtggccttgcagggagagtgggacttgacacaattatttcgaccaacggccatatgaagaggcgttttaccattggggccaattgcgtttacattggcaccatacttgatcaattcagtcacaatttctgactttctcttggaattgcaaaggcagacagtcacatgaagtggtgatgttttgtcggatatgtggatatttggatcagccccgtgttcgagcaacaggcgaacattatcgacgcttccgggccgctttgaaatcttgtatatgtcgtgctcatgttccgtcgaacgctccaaaatatctgcgcaaagagcacggcaaccacaaatagcaaccaaaagtattggaatacgcccaagatccaagtcgcgaagggtgggccaatcgctggaacaattcggatcagcccctagtttgaggacttctttaacagacagatgtttgggccttgactgttctagattgtcaaacagcgtgtctatgaggaattggcgatacaattccccaccaaacccccctttcgaagccataaactccagcatatgaatattgttggtgttaatgacatgaaacaatctccacgtgaatttatcacccatacttcctgccatattcgaaagttgttcgactgccttctcgtaaactgtcgggcgagtgttattcaagctccatatcagtgccttgatagttctgtccagtggtctccagagcttaaagccgatcaccttggagagacggcgattcgattgacagagtctaatgagagactctgtcggtaactgacctgcaatgagctgcaacagctcgttaggcaggtcaagtattgatgttgcgaatacttgtctcttccaattataaaaggcatctgtcatgaatattcgcttggcatctctgagaaagactcgcgctgcctttcgccctgactttcgcgcttgtcctccattggtcaaccaccaattcggaaaagggcatttggtcgatgcaaggattcgagagctggaaatagacatgtcagagcttccgatactctttccttgctctgaataattcaggacgatgaaatagatcagctccacctcatcgggctggatcttgagggaccaccgagggtttgcatggaggaatccaaaaaatttgcatgctgcattgattgtcgcaattgacgtggaatctaatggagcaaggttagacaacgacatactgtgaaaaccccaggtggatgttggagacgtgtctcaggaaggtagatatcacaataattcatatctgaaggctgtagagctgatcatcatgcaataatccatctttaccttggtatgatatcttgtggtatgagtcgtctttaataccatagtcacactgagcttattatggaagcttgtcgacctcttccttagaaggatggccgtctagaatgtcaatggcacctgttcaatggtagattaaaggccttggcggttcctatactccgtagtgcccagcgtgtcttttggcgatcttattatgcagtctaatccgagcttggatgtgtagatgtaaccctgatcaatcttccaaggttggaagtgtatgtacatcctagagtgcattagcgtatctcaattcttctctgtgattggtcaattgaatgacgctaaaatgagtcataatgagtcgtggaggcacagtcgatcaacaccaatcacatgacgcttactgtggacccatgtggtgctgcggttcatcccttggtcttcggattcttttatatggcctggcctcgtccttcaactcatttcctcaggacaccactcctacagagttggccccctatccacattcaccctagggtccccttcgtcattctcctatagagcgtcacgggtctgcaaaggcccgtctaagaaatccagcgatgcccgcctgcagttgttcgagcgccgcggcagcgatccagacctccgtccactggttccaacccgccctacaccggcacgcaggaacgccatcaagggcctgctgattattcgtcatgggcgaatcttcatccgtacagtgataacgacctcttctcatcgctagcgccgccgctggaaggctttccctcggctgtgccagtctgccaatccgttgacgccctcacacacgagtcggcactctgggcagaacccgatctgtcctttgccgatatcgactggaatttcgtatctgtggatgttccgacgccgtaccttcctgaccacgacggtggcgatgtccccgtcatggatctcgggtatgggggtctctcttctttcaactctctttcggattccggatcaatcgagcaccaacactatatctctacgtctcttgctcctagctccgccaattcacaaggtaggattatattctccagtcaagtcagcggggtctagtttctaacgtttaaaagacggccactcgcatccttcccctatctcttcgttgactgctcccgtctcgacctctctctccagcccctctacctcccagggcgatgatactctaactcgtgttgattcgtcacgggtggaaaagcgtaaactcaacaccctcgccgcgcggagatgccgccagagacgtgtagatcggatgaaggaacttgaagcagagttggagaaggttcggaaggaaagagatgactggagacttcgatgttcgaagcttgaaggcgaaacggatgctttgaagggcctcctcactcgcaggagcaaggatacatagtaggatactcgaagattggagctggtctcaactaattcaattgattttggaaatccgtgtctttgtctgttataagcactattcgtattccgtactttcgggtgcagatatgccgtcaaacttgtccccctacatcggtattgatattaaggaatgctagttagtatgttgtacggagtagttgtatatgttatgctctgtagtgggatatatatttgttgttttacaaaaaaaaagctaacatattcgaggaggtttgataccaagtccctatatggaatgaataaggaaagttcaaggcgaggtttataagatgcatatagttatgctgtatgcaactacctaagcgggtacggagtatttctaaggctattacggaggtcacttcagagctggccacctcgggattagctttgtacaacattagaacccgggccgtctactagaacccgggccggttattgggttgggtacaataccccggcccaatgcacagctcagcgcgagttgggccccacaggtttaatgcaaaaactacatagtctaatgcttgacataggtaccttttgtatggggccatcatagttatatgtcaaaaagatttgtaagtgatatttcctaagcagactaaagggagataagacaatattaacatcgaggttactttaagattcgggaacaaacataagcttcttagagagtctatgtcgttattatgttaaaagggatcgcactttgaaggacccctccctagacagcacgttttccttttcagaaattcctaaataatggaattctcacattatatcctctaaagcttcgtttatttggtatctatttatggctgagaaatgtgattttgaagagattgtaaaccttttgcataacggccatatacggagtgtgaaaggtaaacatatcaagaaacttgcattagactatgttgtacatagtttttgtgcctaattccgctgggccgttccgggtatgcctaaccgatcgtaacactcgcatatatttaatgaggacatttctttatatcagtgtaaatttcaaccctggaatctctcaatatttccatcgacaaagttcactcttcggcccgttccacacaagcacacttacccgttaacccaaaatccattcatcatgagagctgtacgcttccatggacgaggtgatatccgcgttgatgagatcgaagagccagtttgtggtgatggtcaggtcaaggtaagcttagcattcatgtttatgcgttcgcaacgttacctccaatattctaacaacgaaccttgatattaacagattcgacctgcatttgtcggaatatgtggcagtggtcagtaacgtgcgacccaccgttgactagccatttctaatccaacccagacatccacgagtatcttgctggcccaacgatcgtccctgccaccccacacccattgacagaccaaaagctaccaacaacactgggccatgagttcagtggtacaattgaagaagtcggttcaggcgttacagggttgaaggtcggggatcgggttgcagtgaagcctaacctctacgactccacatgctcaaactgcacagtgggcaggttcaattgttgtgagaaagtaggatttatcgggttcagcagtaagccatactaagtcttgtacctatgtatcgatattgacagctacacaaggtcagtcaggtggtctatcggaccacgcagtcgtggatagcagacatgcaattctgctacctgactccattcccctcgatgtcggtggtaagaatgaaccatttccaattcacttgtgttttacgtgtttcagcgctgacggggtgtggtggtgatacagcattggtggagcctcttgccgtcgcatggcatgccgtaagccgcagtcctctgcagctaggcgacacggtacttgtggttggggctggaccaatcagtttggctatcatccaagtactgaaagccaaaggtattacctcaatcattgccgcggaggtctctccgcggcgacgtgaatttgccctggccctgggcgccagtgaggtctttaatcctattgaagtggatgtaattgcacaggtacttgccttgacagacaacgtaggtgcagctatttcattcgagtgttccggggttcaggctgggctcaatactgcgatcgctggtctccgggcgcgtggcacgacgatcgtcgtttccttgtgggaaaagaagcctactattgatgcttctgccttcgtattccaggagaagcatgtcacaggagctgcgctttatgatgatggagactttgaagctgtgattgctcagattgcttccggtatgtcttgtttttacttcctaattagatactctctgctgatctcttgcttctttgatataggcggcattcagcctcactcgatgatcactagtaagatccgaatggaggatattgatgagaagggattcaaagccctcatcgaggagaaagataagcatgtgaagatcctggtcgacatttctgcatgaatcacgcggttagctcacatgtctgtatacatatttcaattttgaattgatttttatgacttttatttacgtaatattcaacataactcggactgtgcgtcaacctttatgcacgctagctacgcgatataaatgggggatggtctagctcgatcggggcgaaccttcggaagtcggaccttacttctcgtctgagatccggtactgtgtaatccagtgcgaatccgaatcgggctcataactatcgactaagccgtatccgtaaaggtatatatcttttccccttgctccaccacccgcttttccctcaatttccgtcctatcatcgtcccatcaacgaagccgtttcactgaccatgtcagatttactttctggggcctccgtcatggagaccgcggcggaagtaattctgcgacctgtccctcccctcatccagataaatggtacgcgttatgtatccaactcatctgaggtcatctcgttacggtttttccatgaatggcagagctttaaacaggatgttctcgaagcatccgattctttagatcttagccatcctgtgccttacacagatgatgtgtcagaaagctacgtcgttggaagcggacttggtttgaccggaaggttctccaagaatgtctatgacccagtttcgaaagtgtttgccactacttgcctctcccacttgaagttcggtgattatcagtcctctgcagggccaacggacacgagtcaagtgcctcatattactatgttcaacataatgggaccacctcgcccagcggctgtcggagaactaaagtctttctggacagttgaacttgaggactattccattcgcgaaggctatcaacggttaatcggcatccagcatcacattggtaagtccagttgtcaggtgtaacgggagcattgacagggtaagatcgtactattaacatctgaacaatgctgaatgtttgtgactatctgtattgtctattagattccactgagccgaaacgtataccatagtgttgtataggtgcagcccccatttcaagcgatggtcgaaacatcaacaaatgatgcttctgctagagtaatacaacgactacgagctcgcagagttgggcagctcagctcgcttgcgatgatccaaatgctccagcttctcggatgtcttctcgctcgagtccgagtcctcgcccaataaagccagtaagccaatctccctctcgatccgacgcttcaggacctcgtcctcaacggccatgcttccggatccgaacaattcatccatctcttccagtgtgcgacccttggtctcggagacgaggaaccacacatggaggacaccaatggtggtcaccaggccgaagaagatgaaggtaccgtaattcagaggcttcgataaagggagaagttgacagaccgaccgcgaaattgttgagctagcatcctgtcagaactgtataagacgcaatgaagtgcacatatccagttgctacttccaccaatactaacaccctcggcgcgcatactcaaagggaaaacttccgacacgacaatccacgcgacggggcctgcttctgttagtgcgtctgtcagagtccaaaaattggatttaccccgtgcgtacggaatatgcaaagttgataatgaagatccacacaaaaagaccacggcagcccagccagcccccttatggttctcgaattcgcccgagtacgcagatcggtcataaggatctagttaggatctagttaggatctaatcaagtgattaaatcgttagcaatacacccaatatatttgacccgtgaccaataaagataaaatctaaggacttcggttaaagctctaactaattatatccattattctggaatttaaccctaaacccggttacaatataaactaatatatataatcttggaactatcacaacaggtgccatggtcatataatgacgtgacacatcgctctgtccgcgggctgttagccctgcagcccccggtcgggtggcgccattgatttttgattttgtattttgtattttttggggctattttcgtctgaaactgcaattgttttggctttgtttccttttccttttatattccacgaaacgtccacgcagccgcatccaaccagatctggcaatgatcgattataaaatcttataattacttcgcagcacgcaataatacgaatagcgtggggtgatcctaggcccttggctggctgactgtgttgggggcattgctggcagtggggaatgagtgtgtttttagttgacgcctcctggctaaagatccgggcaatgtcccggatatgtatggacgtgggctcgagaccttgcccagatctttagtcggggttggggtccatggtcgatgttgatcgggtacgagattcgagatgggtttgcggcacaaggacgccaatggtgcgaactaacctacttcagcagtgtcgatccattgtctcgagactctccttgtgttctaattttacggcatttacggagtacccttgcagtactccgtaaaaaaatttagtcgccgtgccacgcatcaagaagatcataggctttcaagccatttgttatttggcactaaccttgggaggcagcacgtccccagtgttcgcatctgattgatccaatatcgtcaatatcgtcgttttgtggtaaacacgcctcagccgtgagctgagacagacaccgctaatgtctgatataattcattggcccattctactgcatggatccatagggatggggcgggttagagaatttttcgatccaacctcttaggtatataacacctttcgcttgggctacgcttggacaaccccctttttagttcaagttccctttgtcgcgcaatattttattgtcttctgtcgtccctatatttggagccgagtacccagcattacaagtgcttgaccactttttcttttctacggtggaaccctaccgacgtttataacctcgggaaattcttgcctaaccaaaagccggcgacatgggtacaccacttacagaaacagtcattatcactggtggaaatgggtgtttaggctcagagatcgccatcgagatcgcgaagaagcagcctttcgttcatctattattgacggcacgggatataaggaccgatgacgtccgcgacctgatggggaagatccgtttgatcggccctaggtcaatagaggttctcactcttgatctgaccgatctgaaatctgtggcatgtttcgccaaaaccaccgtcactcgtgttcgctccagagacattccgcctgtgaccaatctgattcactctgctgtcgctacatcttacgttatcgatgagctcacatcagacggctacgacccggtgtatcagacaaattgcctatctccatttttattgaccgtgggactgctcgaggctttccgggctggagatggtacaccaaaaggcggagcgaaggtgatcctcatcggctgttctgcgacatcttccggggaattggattacttcgaccgcgaccatggaagaaacggaaggcaaccgggaactgcgctgagtgcaaaggaagagaatattcgttttgggagcagcaagttaatggcgagtgttgcattatatgcattgagacggagcctgatttgggtaagtgaacttgatcggagtcattctctcgatttccaatgcaaactcgtacagtttactaataaatctaattatagaccggtcatatatcgcttgacatcttcacactggatccaggaggcatcactggccagagtaatctgcggaccggggcgcctatgtcggtcagagtcgcacaccagactcggtccgggcttcggccattcctgcgtatggtatcccgaagctccatgaacaaggccagtgttccagccaaggcaatcgccagagttgcattccacatcgacacggtggagaactggcaaaaggaacgctactttattctcgacagcgagtacgaagccgcatccgtcttgccgagcctgcgtgatggggaaaaagtgaacaaattattaatacagatgatgcaaatgatagaggtggaaacaaaggaggtgaattctcctcctattccacctcaattaagcgtcatcccgcctcctacgctttcactgtgaagggacggacaacacatttttagcattgggggaatactttttttttatatgaaattagcgaagcgaactggcacagccaaagcatttaatctgttatttaatctgttctttaatctgttatttacttcaattatttctagatcatgttataaactgcctataacaggtggaaaccaggtacaattccgacgatgatcgcaagcggatgaccggatttggtgaagaccgcgacagctgcgaggccttcgatcacctcaccaccaggtcttccgaggtcctttcgcttctgttctgttcattttttgatatttcaatccttccgactttctttttctttcatttaagccttccaagtctggcctttaaaatcggggttgtcagaaggtctccggccgctacatcagttcttggcccccgacataagcgccccaacggcttatgacagcgcccgcagtgatgaaccgacacgtcctcgaaaagggccactctgcttaccccaggggctcggcattttcaatctcaccgaacaggtaagccaaaccacctagtccgatctaagtggcccctttcccattgtccaagcgttcagccctgtcgtcatgccagatcatgaagcttgagatcgagactgactagtatgcgcctccaggttccagcctcgctcgcaacctgcccttcggagacgccggcagctcatccagcgcctctgcctccttggcggtgtgtcaatagtgctcttcctcttgatcttcccatcctggcgcgccgccatccttcccaccatctcgcttggccttatctcctaccccggagatctacacctacagacggtccgctactatgatttatcggaagtgcaagggacggagaagggctgggaacgcggagagcgtgtcctgatgtgcaccccgctccgagatgcctcgtcgcacctcccgatgtttttctcgcaccttcgaaacctcacatacccccaccatctaattgatctggcattcctggtatcggactcccgggatgataccctaggcatgctgtcgcgtatgttggaggaaacccaaaatgccacggatccgaaaatgccctttggagaaatctccgtgatccagaaggatttcggacagaaagtgcaacaggacgtggaaagtcgacacggattcgaggcgcaggccagccgacgaaagctgatggcgcaggcgaggaattggttgctgagtgcaacgcttcgcccaacgcacagctgggtctactggagagatgcggatgtggagactgctccgttcacaatcattgaagatctaatgcggcacaacaaggatgttacggtacccagtgagtggtgaatattgcttgggttttgtgatctagactaattggcctcgtctgtagatgtctggcgcccgcttccggattggcttggcggagagcagccttacgatctgaactcctggcaagaatctgagactgccttggcgcttgcagataccttggacgaagacgctgtcatcgtggaaggatacgccgagtacgctacatggagaccccaccttgcctacctccgcgatccttacggcgatccagatatggagatggagctggacgggatcggaggtgtcagtatcctggccaaggcacgggttttccgtgctggtgtgcacttcccagcatttagtttcgagaagcatgccgagacggaagggtttggcaaggtaagacagcaatcaacgaggtgggagttataattgctaattttgcttagatggctaaacggatgaagttctcggtgattggactgccacactatactatctggcatctctacgagcccagcgtcgatgacctgcggcatatggagcaaatggaggtagagcgactggctcgcgaaaaagaagaacaagagcgagccgagcaaaaagatagcactcagtccgagtccgtaggtaacgatcacactgtgaaagggggagaagtacaaggctctgctgaaggcccggctagccagcccgtgaaagacgccatggattctactgagggtcatttgaaagctcaagctgagacagtcgaccaagccgagaaggtcgaagtagtcgagaaagcaaatccatgatcctcgactggctttccttcaccgcttctttgatccagccggctggattacgcattgcattctcacatgcgacttgaatgtctcatctccctgggaagactatttgtctgtttagattagggcatatttatgcccaagctctgcaagtgtaggagctttgcttttcattcttgttctgtttcttgcacatgtcttttatatctttgggggacatttctctttccacggcgtcaaaatggaatatagtggttggcgtgttatggagatcaataatttgaccattcaagagcaacacatacaagaattgtacgcgtatgtggtctctattctagactaagatgatataaagaacgttttatttaagattatcctacgttttctgtttaggttactacctatgggaacttgttccccgaggatatagcgtccttacaaggtcatcccctcttttagcgcgtcgtactgcattcctcaaattatctcgaacgaataacacgacatctgttaccggagagtcctatattaatggcacaactatgactactacacagctagatctacccttcgacaaggttgttggccgtcctcctcaccaacccctggagaaagacttagtgataccagagcaagagctgagaagttttgccgaggatatctggagtgagcagagtctcatataagtcgtttcgatcctgatatgttcgttggccaccaagcagcagacatcatggaagacgatgttatactcacgaaggacgtgttggttcgaaagatttctggggaggtgcgtggctgctcgagactcaagccagggtcttataatattcgggcttaattgctgatgtctcacgtgtttatgctgatgactattctatttgtaacgttacttgactatcgtgggcctctgtatgatcatattgctactttgtctgggccatctttctcccttccttcggatctgattcgctcccgggtgccccgctgcggcagatacaccccatattgttgggtgcagaatagggggcggtacagggcagcgggcggtcaagcggcaactcgccgtccaaagttacgggtggaaaggcggccgtttctgacgccagaagctgtcattttcggcgtcgatttcacaggtccccatattctatgtgtaatatgtggttatttgattggtgtaacaatataaccaacataaacaattccccagggctcaaatgaagacattcggatgaagccgaatacttcttaggcggtggtccgtgtgtctccacttcgcgtcaacgcgtccgaagtcgatgcggcatttccccgattctcactcgtcttcgacttgcatactctatgcacattgtaagcctgcaatgtctactcaagcctcgagcagtattcttttcacccactttcgcccccaggaaggcttccggttgctagagctgaccccggagctggaagaactactgacatcgaaagatgcacctgtgtaagttgacgcaatgaacaggagtccaagcagaccagaagcaaattgctcgctgccatgtccgaaataaacccagattggcagcccttgactaactcacgacacccagactcgaactcaagtcgccctctacagctctcgcacaagcagtagtcgaccccaccgccaacgactacgtcaacctatgcacaccaacgcaaacctaccgcatccgccaagtccaatcctcaaactctctacacatcctccgcccaagccacggcgagatctcccaagcagacatcaaagtcgttgaagaagaagccggcgaaagcggcgcattgaacctcccagatgaagctgtaacggccgttgcgaagtgttcctcgacactggaactgcacatcccgccgggaggattctcagccatcccgttcctagagaagagtctgcggctgtatgaccggcgcagcgacgatgacggggacatagcgatgggcggttctgctgactccacaagcccgctggggttcaaggagatgcgcactgtcagggagaatgtgtgtcaggatatccctgtgtcaacggcacagtgcgaacagggctggatgcagctttgtgcgtttgtggatggggccgaggaggtggcgtgttggcggccctctgcgcggtctcgattgactgtttggaagcggttagtcgagggcgctgttttgcagggtattgatcttgagaagcagtttctcgttggggacttgtggaagtctgttttggatgatgaggaggaaatggagccgccgttcccacgtggattgctggaagctgttgtgaggcgcatctgcatcgcagatgagcggccgcctttggcggatgatatcaaatgtgagttgaaatagatgatgggatgttgtaggtatcgggatggctaatgattgtgttgttctttaggggcaagctttgataagattgaatgtacgcaatgggttggcgagacatacttggctgctgccgctccgactgtgtcgtctgctattggaagaagtgaattccttcgcgcatggaaggactgtctgcctgagacatggagaagagaggcagccctgtcaaaactgccggtaacttgaccttttcctaaatgagctgcatcgcaatagctgatttggactacagaatggctgctacaacagtcctgaccctacgactatctgcttcgttgaaccctcgcaacggcagccaaccaacaaaaccgcctctgcaccagccacagccgcgaaagctaagaataccagaaattggcatgaactactcaaaggccaccgttgattgcaaaaaaaaaaaccactgacgcacttgctgcgtaaaatgccatggcatctaatctatgatgcgcgcatcacgatcatatctgccgcccaaactcgccccgatctcggacttccaaaaaaggaaatgggaagaatcacgagcaaacgaagaaacaaatctcgaaatgatgctccaatgaatgaataattagcaccaagtgtacttctcattcaaccaccactccacgtccttgcccaatccttccccctcgccggtccagcgtaaactggcgatgctttccttttcgcggtgcacgagctcagccttcgggtccaccaaagccacagccttctgcaagagggaagtagggttccagaattcaaccttgctcatgttccactcgtgcgcctcttgttgtgctcgctggaggatagcagccatagcttggacagtggcctgctcctccgccggagacgtgggctcatcatacagccaccgaagaatatagaggacgttatcctcgggcacctcgccgaagttccgattccaagcgcaatacacgcgggcctggtcatcaccagcgcccttgactacaggtggagagcgtttgggaaacaagttctcagcataaaactcctctcgagcccaatgccacaaatagtggtcaaagttaggcaaaatggcaatcttagcaccactcgtcttctgcgacgccaggcgcatctgctcgcacagcttggcaagcacagtctcactgcacaaacacttctgaacatcctcggcaaatagattccttgtaacagccttctccggctgacctgcagtagccggtaaagaaatatgggaagatgagaacggccgccacccaaactgagcgtaaaaattcttcccgatatccgagaaaagcaccgtaaagagcgacttccgccgtggctctttctccatctcccacgtctcgagtttagtgcttagctcttctagcatccgctttgcgtaccccttcccgcggaaagcaggccgacagtagacactccccacgccgtgcgtggaaaccttctctgtctggccgtcgtgtgcgagcagcgctgtcttccggtacgactcgcacgagctgagaattgtgcgctcgtcctcgggctcgttgcggtccactaggatccagcaggttaggccgtcgcgcgtcagccgttgttggaggagatggttctcgcgttctatgtatgtttccacatccagtggccctttccaggcaacgctgttcagcttaattgaggcaatgcgttctgaggctgtggctggagccaggatcagatctggggaatcccctgtggggagggcggggatctctgcggcaatcatgttgaattgagcagagttgaagtatgagttattgaagctaggaatatggtagagaaaggacaacccaagggcaagtgcaaaagaatatataataacgagaaatccggggttaaagtcaaaagttaaagatgttccgaagacaaaaaaaaacaaaacccagaagtttggaagattccccgtggaccgacgggggtccgatgccataatatactggtcatttcgaacttccacaaatagtcacacgaacatagtaggttcttccgatctggatcactacaattggaccacacccaatccatgcctcctctgccccctcaccttgcattccacatcatgatccgggccggatctgcctgccctatgcgtacaaagtaaaaaaaagacgcacaccgtgtttctctttgtcactggcccgaagcaaagcgatggcaagcgatggaggttgcattgcgttagcccttataggcccttgacgtaagagccagtcttttgcctttcgcggagggttttgacgggtcatgtgagccttggcaattatgtcattgtatttatttactcggacgcaacctgtggtgttgaacttcattttatattgcaagtttgagttctatatatcatatgcaatgaagctttgaactatgtatgtggcggaactggacgtcacgcgatcatctttatacatgcggaaaaagatcccgattagtgtctctcctgacagtgatcagatagttagttgcactccaatgcttgctcagtctcaccttgggactgtagctcactccctcttgactttcatcacacaagtcgataatggtttctcgggaatagacaaagcacaagagaatagctccctacagttcgctttcagcagcgtctatttatctaggctggatgactacggaatatggttagcacagttacatacagcatacctaggtagtcacccgaaggcctaccagcctattttcatcggccagatccaggaaattaaacagaaaagcggcaaagatagacggagcaggtgggatgtaaatcaaatgacacgaaccgagaaccgaaatcagataaatatttgcgacacaaaagacaatatggcattatggacgttcgttttgaatggaataattctcacgggttcatcagcataagagcaaacacggaaaataacaaaaaccataacataacgagacgacattgggaactatttcctagtatagttgaattggctagagaagagaatcatgtagttgatttcaacaaaggagacgaatgagatacaacggtaaaatgggagatggtatgggaaaaaaagccggaccgcagcaaaaaaagatcagagagtagaaaaaacccgggtccagcaagatgcaaagtgaagtagacggaaagctataagaaagccagtaggaaatagaaaaggaaggatggagaaggagcgtcatgaatgtgagaatgggaagagcataggaagaagaatgagctcttgggaatgaagtatcaaaaaggaaagatatgaacctggtctatgtaataaatgccatgtgactcccaaaaggcgtccgctcccccgttttatatatttgcgccacttgcggacggcaattccagagtttccttcgtccatcatgtttttttcgatcgttggtcacgctaaatcaagaatgagatagaatttgggcgtggacaaggggataaaaaaagaaaaaggggaaataggggaagagaaaagaatagaaacaaatagacatgaatgccccccaaggcctgaaataggatcggagaatgtcgagtcatggtggctattccgagtccaccggttcgttaaatttctgtcgtgcttcttctacccacaactccaaccgaagctcaccggcttcaacacgtcgtacaggtactgttttggcacggccattcgagaccttggggggcgattgctggggattgccgttccgctgtttagagacggaaaatggcgcagtgcacgatcttaggtgcaccttgcccggttcggccacaatccaagtttgttcttccttggtggtccccgcaggtggtaaagcatcttcccgcacttcaatgcagacagtgaaactgaactcgtcatcgcggggaagcggagtcaaccgggcacaggctgacgcgagtctcgctagacatgcccgaaattgtgcctcgaggtcaaccgaggttggtgcgggcccccggtctgagacaggggcacccgaattagatggatcttcggttcggtcttcaaatgtagtattcacctctcccggaggcgcacgcgggaagcccgacagatcaaaggcgtatcgttcgaggggctgacttgtgcgaagagatgaaataatgatactgactgcggtgattgtgcccttgagaatctccgtcccgactgcgattgaagcatcgttgatgtagtcacagacttttgggtgacgggattgtcggacgggatagttgtatgcccgcacggggaggaatgttgcgcgcggatagacggagcgcagaaataggatttgatggacggagacggtgaggaaattggtgaaggaagccgctaacgctgattggtttgtgggcagcgacttggtagcagggaccggagcggagaaagtggtcatggtggtggtggtactactgctctcactggcaatcggcattgccgtcgaacgcgcggtgagggtggtcttgacgaggtcttgatgaatctgaatgatgttccaccctaaagctaatcatcgctctacctttctaagccatcggtcaatgtcaggttcaataacttccaggtggtgtttatgttttggaatcggtcaaagttttttgagttccccgatactccggccagcacgggtcaaccgtcacgatgatccgcaggataaaatggctgatgagatcagggggaatagagcgacagaattgcagtcacccggggtggcatggaataaggtctatggggggaaagaaagatggttgggtatatagtgcgttggagggggttgtttgtgttgcaaaggaaatccgaaacgtacgcttaggtgaacaaaacaacaagtagacacaagcctcaaagcatgagggatagaaaaacaatataagtcccaagcgacgatcccaagtggaagagcttgatcactctttttttagatttaagaacccttggggaggggaattcggagaggggttttaagaagcgaaaggaggggaagttttgagagacggtaaccctcgagggaatatttaagggaaaaagaaaaaggaaggctggacctaagtaggaaaataatgaggaaataagaagttatagggatgaatcgatgggatgtagctctctcttgctcatcgaggggaaaagcagaagaaaggcggacaaggcgaagtcggaagggtcacggttgatgtcacgtggattcgtcatgggtttacagaattccatttcaaccacgatttacttcgctttttgctctatattgtttggttttgtatattaaaatctttctcgttttttggtgctttttttgatatagctaacattttatatagcaagttagcatggcagatatgtgctaaaattgacgtggaaaaagtagacacagaaacagagaaagaaaaatacagtagcatagtgtgcagtgtacagtgttcagtatacaattttcagcatttatgcctatatttgtacaatattccacggagaaaacaagagcatacaagatacagtttttttttttgcctctctttttcttccccactgtccactgtgaggtggataggtactctataagaggggcgatcgtcggcgaaagaagggcaccaagagagactatggaaatactagtgtacggagcacctaaatatataaaaaccgtttaccatgcaatcagactgaagaatcaacggagcataattcaaatgcttggttccggtaccttacctatctatggaagattacaggggattttatataaacctatattacctataacatagaatatgactacgttcgagtataggttacatgttcacacttcttacatagtctactttgtacatcatacatcgatgtactttgtacatgctattagggaactaccgggggtatcagtgaggtaccgggtacattgcactgcgtcatacgcctacccactgtctccagtcgcccgatgatcttcttacactgacggcagtggcggtcataagaccaggcactttcccggggaaaatgtcatttttgctttgtcatttgtgtgttcttgaaaagccatgcagaggtatccttcctgtacgagactatcaatatcttccatctgtttctacaatttccgtgtacctctagcctttatggagcttttcaagaggggtatatgtacataagtacggtatactagactctctagggctacactatatgacaggtactacaggcatacccacccagtcgcccttcattctatctagtctgaattctacggagtattccccgacccgtgtaaccgtgtgactttcaaatcatagtttctccaaaatgacaccgagtcagtttagtggaaccccatgttctccgaacgaccatgacccaatagaatcgactaaaaagatcagaacttgcaccttaacgaagctggagccggttcagcccggaccagtgacccagctgcgtatggcacaggtcctgaaatggtaatcggtaaaccactacggagtatcgaccctcaatggtccatgtccacttgatgtttgatcgaccccggaggaggtctgatctctggaggttcctggcatcagaccattccgggggaccgtgtgacctatttggagacgctattggagagtatatggagcctgtagtctaaattaaacgttgaaaccccgaagttctctcactgtccaacgtgccctataatgtccgtttagccctctgctagcaaggtagtaagggacaaaaatagctagaatgaagctttggagactgccccttgccaataaatccctgtcttcccacgctcaatttcatttaaccttggtgcttgacatagttatttttctggctgccagtgcacactggaatgatatcccgcttcccattcggccatagctaatttcggaggttaggcatttgcttgggtttatttttagtcggtaatgaaggtgtccactgtgaattagcccacctatgtacctatgtagttatgttgtaggcacataattaataatgcaaccgagaatcggagagaactacggagtaagaaatgaacagttgtgtctattgagctataccgaagttgggcttatccccatatcttagacacgcttgatgtactcctacagcttgatctcttaggacttgaaacttgaagtagtcttatattatgtaggctggtgtgtatggatgtagaaacatgatgatctacaaaagagtgatcggccgggtatgcggcctctgcccttgacaaagcaagtctttaataatatcctgatgtattggctcaggatgataatgatcagcaatagtgccaccaacaatgggatcaatagtacggagtagatcactctactatgtacactatacgaaggcagtaaaatgtactgtatagccagggactcaaggacacgggtatagtcatgtaaagaatggtacccgtagatgtctttaataataatccaattggcaggagcttcaataacacacagcaaataaagaagaagtggaatattaaaatcggggcgatatagagccgaccgccttcaaattgcccctcctccgcgtctatttatctgccgacgcaaaacattggattctcaatattgcgtgactgatactcattggcttcgaggccttcattcatctctcttctgaatcttgcttgactgacccgcgaacccaaatagcctcattaattatacttcgttcgccatggagcaagaactcctgtcgctcctggcagacacccagtcgcccaaggccgataccaggagagcggcagagtcacagctggaaagcctttatgtccatgattccttcgctatctcactcacagcaatcgcttcgcatgagtcagttccggtcaacctgcgccagtctgccctctcagtattacgtaccttcattgccgccgcttggtctccaattctcgatgaattcaaaggacaaatcctcatcaacgatgcgaacaaatccagcgttcgccaggcactattggtcctcgcgacaaatgataaccctcagcgcaaggtgaaaaactccgcaagtttcgctgtcagcaagatcgccagtgccgatttcccggacgactggcccgagctgctcccttcactgctcagtatcatcaataactccgccagtaccgatggccagatgcatggtgcattgaaggttctcttagatcttgtcgatacagggttcagtgaggagcagtttttcaacgtcgcccgtgatctcgtttcgtccctttttgctgtagctaccgctgagtccaggcggccaatgctgcgcgctctggctgttgcagtcttccgctcctgcttcgatacattggaaatggtgctggaacaacacaagacggccattaagcaattcatggatgaggtactcagtggatggtcgccgttcttcgacacggctttaaaggcacccctaccgcagccacccaacgaggaagaggagcataaacaaggggagattgcatcgcagtggaggggaattgttgggttaaagttgcaagtcgtcaaggtatgcggtgcttcttcttggttttgccgggctttcgctgacatggttttttttttttcatagactcttatgaaaatccgcatggtgttccctgctcttttgactgcacaaagccccattttcttctcaacagtctggacagaactcaccaacgcgttgccgatctaccagaatttctacattgaggataacagacagagtcgtttggaggatgcggacggacttccccactcactcgatttcctcgttttggaggagcttgatataatccaggcccttttgaaggcacccccagtaaaggcagagctgcagcagcaacttcaaaatgccggtgcgactgccagcacgtccagctggcttccggagattatgaagctcgccagttcctatgcacagattacaacagaggaggaggctctatgggagattgatgtcaaccttttcctttcggaggagacttctgtcacggccaactacacccctcgaacttgcagcggagatctagcgattaaggctggtgaatggctgaagggtacagctgccgagggtctcctgggctacatgaacaccgtctttgctgattcgtctgtctcgtgagtatcactctgtatatctgctgtgaattatattgaccatgatgcaaatagatggaaatcacgggaagcttccctgtatattctcaactgtctgcttcgagacttcggtgaagtcgatcaagagatctcacctgagctggcatctcacttcactcaattcgtgcaatatgcgacccaacaagaacaggagctcttgcgcgctcggggctaccttgtggctggcgctttgtccaaggtcgccggcaaggcattccaacagaccacatcatcctatttggaggctactttgaaggcgatcgccgaagaccccgccgaagtggtccaagtggcctgcatccgggtgttacaagatctgatgcccgctctgccgaagggcttggcccgccccttccagcctgctgtgattgcggccatttcagaattcatatctgcacacgaccttcgtgaacagactgactccgatgatcttaaggttacgttggcggaaactctccgggacactattatggccgattctagtgtggttctatcatctcctgccatcgacgtgttgttcaacattgctagtagcggagccgaaaacttccaattgaccttgaccgtcacagaggcatttgaagatattgtggaccaaattaccgatagtggccccgattcttacatgcgtctttgcgagaaggtgcttccctcgttgatgggcgcgattgatgtgggcaatctgactgaagagaatgctttgacaaacttcgcagccgatcttcttcgcgctctagccgagcggagtcctgagcccatgcccgctggtttcgtggagacggtgatgcccaagttgaatcgcctgctgctgaactctgatgaagccgaattaatccggcccgccacagaggccgtacggcacatgctctctcacgactttgcgcagttcattgcctggcgtgatcctcaatctggaaaggaagcacttgaagttgttttggtcatcattgaccgcctgctgggcccagccgtggatgacaatgcagccacagaggtcggccagctagcagcagaattggttgaaagggccggctccgagcgcctcggtccttaccttccgcagctcctacaggccgtggcacagcgattggcgacagcacagcaagcgcaattcatccaaagtctcattctcgtcttcgcgcgactcactctcatcagcgcacacgaggtagtcgacttcctggcccaggtcaacctaggcggccagagcggactcaccgtggtgctgagcaagtggcttgagaactccgtcaacttcgccggctatgacgagattaaacagaacatcttcgccctggcacgtctatacgagcttgccgacccacgtgtggccgaagtacccgtcaaaggcgacctcatcatccaggataccggccgaatcaagacccgctcgcaggcccgcaaaaacccagaccaattcacaacagtgcccgcaccactgaagattatcaaagttctggtcgaagaactgggtgcagcatccggaaataaggaaatcgatgctgccgctgcggccctggatgacgccgacagcgacgacgatgacgacgactgggaggatctccccagccaggtcctggacctcggcattggagccacgaaacaggggctgctgaatttcggcgagggcggctccgagagtgtttttggtgtgcgtcgccgagacgatgaaacgcagggcttcctggtggatttcttccgacaggcctccacgcagcctggtttccaagaattatatgcagcgctgactccggatgagcaagctaagctgcagagtctgtgagtgcagctggctgtggttgcgagtccccttccccgagccccgggttattaatggtttgatgcatggatgcccataaaacatacaaggacttgtatctgtcgcttgtacagagtaaacataccttttttatttattttagttgcttgctacttgctccgtactgtagaatgagcattagcagatccttgtggtatggatcctggtagtttccggtctaggccgaactggagcgatccacaaatgccagttctttgtttgcacccctgtactccggactccgtagtccgtacaccgtatgcccatctgcaacattgtgttttgttgattaacttcaggctagaggcctagccatttgaagtctatgacaagagataatgataggtaatttggagtggtataatttcatagttatatggctagttaggctccttctataacccgaagcaaaaagtacataagtatagaaaattgaagcgacgagtcagaacatccctgtctctgcatatgccattccttccagtcggaaccactcagggattatccgtcccgtgtggggatgtaccagacagccgggtccaagaggtccaagatcaggggtgatccttgctttgagtttggcctttcctttttgcctttttctttttgcttcttctggcgaatattcctttcatctgtcccagggttcccagctgagttgggcactcatactcttacaacacctctcggcttcctcttctgagttagtgcttaccttttaccgcttcgttgtcaaacggagcacgccattacctgtagggatccacctgggcagcagggtctcggagttaaatttagccatactactccgtactccgtaagtagctacaacatacaaagaaaggaagggaaaccaaaaatagatgatgaatatccaacatctccggataaatcatttcatatccatcatcaaaattgcaacaatcaaggatctcttcaaagaatctactgttataaggcgataaagagagggtttcaagatttcgatatcgaattcccgggatactctatacattcacatatataacgcccaatccactgggattgttttctgttaataattgaagagaaatgaacttcactaactactatgggaatagtcggctgcttatgcggccttctcaagtcttcttaggtagtatttttaaatgtcgtttttgcccttctcgattttacagctagatggctgagaaaggtcgaaaaaattgtctgtttctatgtacaacccactttgtctcacaatgttttcaatgagaattgactttacgctactgctcgcggtgactggctcttctgactaccaatctggccaaactcagcagcggtcctcggcctgaattagtttacgggtttattactccgatctagctttcactctacgaaggctccattgctctttccttcaagctgaggttaagaaggcgaagacgataccccaaaaaagacatgcccaggtcgcataagcgatcgactactcttcctcgcctttatagtttcccggatttaggaatgcatatcaccgcccaattcttgaatgctcaacctatcaagccataatgagactcactactagtagccaaaacaaagtagattcatacctgaataaatacgtatcattagcaagtgtcgggaaaatgttgaacattgattttcttctagagcatggtccattcatgctatggacagactagatttgcaatactaattaaagatcactttcatgccatgggtttagctagaatagaagtgacttacatccaatctatccctaaaaagcttcgatgtcttgcttatgtcttcgcaaactagactgacgtcgtttctgaatgcttgatcaaaaccgaccggcagttgtcatgaaataaaagtgccttaaataacgggcttattgctgacgattctataccaagggccgagattttcggtgttactgtcgctttcaatattgaaagctaattcaagagcctagtcaaacttggttacagcaatatctgacaactggatcctgtttggagcccgatgcactaatctagtctggtgagaacactcaatgtagaacttagatttgcatactcggtatcttgctgtccagggagaacgatggctaattttacattcccaagataggcagtgatgggtaccttccgtggggctatacatgatgtggctaatatatccggaggcctgtgatttgaggatcgggagcaaagatatgatcagtactagtcagaactgaggtgttcgatcgatcgggacagatgatgatcctaggaacgatacctgatctctgcaggggacctttctccgctttcacacatctggcagaacctgatttccctccctgtagcgatcatcttgtcaacatatgacgtctcacgcagggcataaactttttggtactaagtaagaatgccacattgagaactcaatgcctggaaactcttggtcatggcctgttatcacatattagagaattgtctagctgatcacagtactagtatgttgggttatcgtgggccgctatgagactgtcttggaaggaagacccagcacagtgggccagcagtaccctaatcctagttaaccagggttgagatcccgagaattgtaaccctggaagttggaaccttggaaatgttaaaaaatcgaaaatcgaaaatctaaatttcgggtcagaccgatttggaatgggcgactttcccgtaccaggctgtcggatttcccacctgcggggtcaacaaaagcaaaggtacggaaccggccaggtggtagaaaaaaacacagtggctacgctagggttctccccggtatcctctctctcgggttccttttcttggttagaattgatagcttcatttcacttcccccccctcctccactttctctcttcatagcgaaaaaaaataacttccctctctctttcctacctttcctcctcctaatccctctccctcctcctttctgtctcgccatgtcacaacccaatctcaacgaacgcatccaagtcgacgtaagtagatcattccctctcatttgttcaatctcattcctaccccatatccctataccttccagaaccccaaaaaaggtcacccttgggcccctttactaagctcacaaccccgattcccaaacttcctacaatctccaataacacccccaaccgccactaacaaccccccagacaagcgatgatgactctctcttcgacatcgaatccctctcaggctcaaacctttcattggcatcctccgtccgagactacagctacgaaaatggccgccgctaccacgcctaccgcaacggccaataccccttcccaaacgacgaagaagaacaagaccgcctagcattaacgcaccacctcttcaaactgctcacaggcggcaatctgcaccgcgcaccaatacaagactccgacccgcgccgcattctagacatcggcactgggcccggcgaatgggccctggaaatggccgaagactacccgcgggcggacatcatcggcaccgatctcagccccatccagccgaactgggtgccgcccaattgccgcttctatatcgacgacgcggagagtgattggactttctcgcccggtgaggcgttcgactatatccatgcaagaactatggcgggcgggattgaggattggccgaggctgctcaagcaggcttaccagcatcttaagccgggcggctggtttgaagcgcaggagttcgagcattgtgtgcgctccgatgatgggacccatgagcgcgctattgctattaatagctgggcggaattgttgacccaggctagtaagaagtttgggaagccgatggatgttgcatcgagcatttcggagtggatgactgaggaggggtttgcaaatgttactgatgatatttataaggtatggtcccctttttttcccccgggtgttgtttcgcatactgacttgctttcagagtcctgtcggtggctgggccaagaatcgccgctacaaagagatcggtcgcatcggcaaggtgtctattatggagaccattgagccgtactcactggctctctttacccgtgtcctgggtctctcgtaccaggatgcacaggagcatatggaaaaggcgcgcgcggagttgatgagcggttcgcaccacctctatgtgcgcttccactttgtctacggccagcggcctttcgacgatgaacccactcatcccgaggctccctgaggcttggggctgtggcaacaatgattatcaatgagacactacgacctaaaattaggattgagaatacttctatccctatcgacctctcgatctctggcaacatgcttgatgactatatttctgcccactaatgtacgaaggttctatgtactatattgtttgttccacttatgttcatattcatgtggacatggatatcgtgaagcatccgggagttgatgtggtgcggtgattatgtcccagacggtcccaccatgacttcacttgcccggtatcggccagcgacccgggctatatgaccgacatatccaagtgggggtttcaaatactcagctccgaacttgacccgggccacttgatttcaaggcattcggaatatgcacacacaactgacctaggcctgcgaccgggctcgggttgagggtgcgcttacgccgccgcaagccgcccagtcccgatcccgagaacctgacacacacccgagacagcttcctccggtgaagggcttgtccgcaagacctgaatcacctgaggtaaacgttgctcgtcacagctgccaattgtttccagcaggatctctagcagttcctgtttcccctcgcccttccatgagcttggcatcgagttcatgatggttgttggtgaaggacggtcctgggaatcagggccggcatggcttaaggtatcgtctgccaagtgtgtcggtgcgggtggggagaagggcgcagctgcataggtgttgatgtttgtgttggcagtgatgttggtgaaggggatagtagaataatgagacggggtttggtatatatgcgtttgcgggaattggttcggactcggattcggattcccgtatgcatcttgcccccaatgatgaaacgcatgaggcctgtcatattcatttcgtattgagtattcttccccgtaatgtggtactgttgatgtgagtatgggtgcgggatatccagtgtgttgtaagtatggtagtgcttctccgtcaagcatgtaattatcgctattgactccatatatcgacgggtagtgcatccctaacattgcatcctgcgcgtgtaacgcgtgcactgggagaccctgcatcggtactgagacggttccggtcatggcccccggagggtaggtcacgcctcctgtataacaatcgaacattgtcgtatcttctacagtatctgcctagagttagcataggcgccaaaaagaagtgaaacaagcaaaacatacttctacaagcaaggggttgaactgtaggcccatctagctccgcaatttgcggcggataccccgtcgcgataggataagccgaagtagaagtcgaccgcgacgaagcggatgtcgacctagtcccattctcactccccgtactatcaggactcgtcacagtcatggagttcgtgatgatcgatgacgctggcgatgacccgcgccagctaccttcaccagtatccggggtacctccagccgaagcagaaccagcgccattgccatggccatggccatgaccatggttgtcgtagttgtgcgcaggcgcatgaggcccagccccttggcccgggcgctcgtgctggctctgggtatcacccggctctcgtgaaccccggttcaggcgctcccgcagctgtgaaacttcgcgtcgtagttggtttattatctcagattggctgatatgggcccgatcttcagccgttgttaggtaggtacattctgcttcgagaccgcggattatgcaggcgtggcatgggacggagcggtcgcactggtgataagagaaagtggttagtggcttgggaattaattaagaatccatgggtgtgagtagagataggaacagaggatccgggtaccttcactttgcgctcgcgacatctgaggcacgactgctgcgggcgtatctttgtcttggagtcgggcattgcggcaatgccactctacggtattgcaactccgtgcggtgaagatcaatccctcagagattcggagaatttgttgaagttgggttccactcaaagggtcccagttctccatgcagggtcagtcagctgttgccccgtattccagggaaatgtgatggatcgtatttcagatccatatttttctctctatgttttcctctgcactctgattgggtgcagttcgcaatcgcaattttcttctgaaggtaatcaagagatcggtaccttcgaggagctcttttgttgtatgcagagctatgctacttcatctgcaatgatcgaagtcgatatatgctactttattgaatatgttctatgttgatgttaccgtcgcaacgcttatcacgtcccccgcgattgccgtagatcgcagttcatggaaatacgacgtcggtgtggggaatccttgaaagggacctcgggacctcgggggctagtgagttagtgaaggaagtgaggcaatgagacagtgagctagtgagctactgagctactgaaggaagtggaccacgtgcgcgaagggagtatagggagtatgtgctacataccatcaaaccatagtcattacatcctttcccgtttcgcctatacttccctattgcgaagataacatgaagcccttcccgcccataagctggctaacccggagcatggcctcctgctgttcccactgctaccagtgcaagcctcgatagagaacccagtcttcgcccgagcacccagatggggtccaacaattgggtgtttcgagtgcaatctgaatgagacgcttgtcagcgaaacagcacaagcaatactgagccgcggcctcctccgataaaaagtatcatcattcatacattccgctctgtacattctgccctatacacaagataaccaaatccatcgttaaatacatacaaacaacaatttcaaactttcgaaagaaaccttgaaatgtctacccctgcaaagaaaatccaaccccctccccagtccccatctcaacaagattagccctcatcttctcaggcctctccccaagtccaaaagcagcatcatcacgacgaacccaagccccaaccccatgctgcagtaccgcagtagccctaaccttcttcttctcctcggcatcatcacccccatcctcactgtcagaagccttcaatccaagacttccatgcaaagtcagcctggtctcaaccccaccctcactctttccccgataaattccacgatgcaagatattactattataaaacactgcatctccaggctgcaattgaacaaccaattgatccggcaactcagccgcataaggatccgcatcacgctcgacctgcgtgcgtgcgcgtgcatgcgtccccggcacaacaatcagcgatgcatcggggcacagcgccaagttgtactggcaatgcgactgacggccgccaggcgccttagccgcaagctgggcaagttcttcctcggcggtggcgtgttcggagatatcgtcgcggtgccagcggagctcgaagtctttagtttcgggcgccacgagcagattgaacagttccatgacgaggggctcggtctcgctgctggcggcgttttcaacccccatgagctcctccgcgacggcgagaatcgtgggagagaaatagcatcgtgcgaagctgtcccgtcctggcatttcggggtgcattaggtgctgcacgccccagattccgccctccgaggcgggcggtacggttgtcggccagggtgggaattgttttgggacggtgcggaagtgcggccagcctccactgcgagtcatggttgtggcttttgtggcaatttcgtggtagtgcgctacctcggctggagtcaggagattgcggactaccacgaagccatcgcgtttgagggcgtctagatttggggtggacatggtaggaacgttgaaagaggaatgatttctggaattcgcaaaatatctggagatcttgaaatcaatatatatctgcgggggtggatatacacaatacgacgcaacagtgtcgcatctacttttctggggactcgatgctaccgtggatctccagatgtgacctttcccaaggttatcgttatcgatgtatatgtttttatctgctgtgtgtacatatgtagtatttgattctaataaataaacaaacaacttaacagcataacaacacaacaccataacaaactcatacattgtcttgttcctagacgtcatggggatcaacgccatggggatcaacgccaagaatagccaagagccagagggctgagtcctcccacagtgtgatgtcgcatttgatctttttctcttggattcctttgttcatacctctctagcttctgcttttttgcgatattccatattatctccttgaattccaagaaaaattcaaccttggtgcaaatttcacccccgccatgcccctccttcacgtgggctccgccctgctagtattgctcctgatactcccgcaagtacatgccttcggagctggaaatatcgcctctatctctgctgtagaaggcaagaactggcgccatggtgatatcgaagatgtcctcaagacgctggctttcatctccggtcacaaatggacctcgaccatgatcaagcgcgtgtattttggtaactggttgcgcgattagtgagttatcaaagaatccagtaaagatccaatatattcctaactgcttctgtagctcgcaggcaatggacgttggaactcttaaaaacctgcaagccgatacaatccgtgttttggtgtgggtcctctcgttcctgagcttcggttatgccacggctgaatttgaggtgactgcggagcgattgggtgtttaccgtcccgaggaacacatcgagtaagtccagcttgaggtatattgttggtgatttgtactgattgtcttcttctgcatagtaaccccaaggactatgccgataacgaagacgcacgtcaatatgacaagcggttgcgcccacccgttcgtgctattgagctcgaaatcgacccgaacaccggtatgaagaactacatcgccaatgagcgaggcgactgggccaccagcgcggcctttatcaagttcagtcttagccgcagtatccactatggacggacatacaccaatggcggacataagaagggcaacgaggaggacctgtgcgaagcactccggtgtctaggtcagggactgcacacgttggaggatttcgctgcacacaccaactacgttgagctggccttgcgcgagatgggtttcaacaacgtgtttccccatacgggtactgccactcagatcaaccttcaagggcatcacgttttcccgcttgtgacgggaacctttggtatggtcgatttcttccattccgtgatgggagaagcaaatgatcattttactcaatctgaggtcaacgagatggatattgcgctcggtgatgccgcagcaaatgcgcagtcgaacaattccctcaatgctttgactgggctcttgggcaaaatccccggtaccaaggatcttgtcagtgaggcagagagtctcaagaggtcgtcagaagcacaagaaatggccaaccggagccgtagtgctacaaccggctatgcgcagtcttccaatagtcacgagcgatcccgtgcgggcccaacgggcgatagttcgaagcctagttctgggctcaacgccatgcctgatttcaatccccaggagacagtagccaagatctatcccattctggcattccgagataaggtgatgcggagcttgaacgcaatcattgaaaagatcccaggcttggagtcactcgttgagaagatctccgagactctgaccgttgtcgtcatgtcgctcctagcgcctttcattcgacctttgatcaaagctgcttccaactccattcaaacaggatcagcaggcgtcattgatgcctctggcaagcaccagtacgaaccttggaccgatcctcactgcaccgaccccacccactccttgctctccaaggaccactttgccaacattctgaacgagcccgccggacgagtcgcctcttcaatcgtggagtacgtcgcgcctcgcgttctgtatgcttggcaacacaccgatgtccccgagagtgaagtcctcaatgattgcatgcaagtcttccaccacccagcgttgcgcaacatgcacattgatgcccatcgtgtaatgttcgagaccgtcgagaaatgggttcacagccgctcagaccgcggcgcttcccttaactccgtcctcagctccgagggcgtgagatccggccgtaatactggtggagtcagccacactcacagcgatggtcatagcgcatttgcggcattgggtggtgcctcgcacggccaaagccagagtcacaaccagagcagtaacaatggcggaaattcatctggtggattctcctcattcttcccccaacaaaaccagcaacaatcaaacagcagctcctctggcatgccctgggacaaactctccagcatccccggtttgtctggcctgagcaaattcgaaagtaaaatctccaacttcctccctggcggcttgtcacgcgatgcaaacgaccaaggaacccaacagacccaaaactcataccagggctaccaggtaggtggtgggcacgaagccatgcaaccttctccacagcagtacgaaaactaccaccagcctcagcatgtacctcaacatagtcaaggctaccagcataatcaacatcaggaacagcattatggtggctcgcagaatcatccgtcctatgtacagcaggatggccacttgggccacccgcagtcgcacaattctcacaatgctccgccatatggttcgcatccgggttcgcatccgggtccacatggtgggtttgggcagggccagggacatggacatggacatggtcatggtcatggtcatccgggttactgaggattagatgataagacgaagataaatgattgcgtgaatatgtcgagatcaagtgcagatgaattgaaatgattgtgattgtatttcatcgggtggttgtttgtgccgatttatgaggtagtggagtttggaaacacgataaaggtgaaggatttagggaacttggaagttgtactttcttttataaagcatatgaaacggacattgagtcacctgggctttctttggatttacatgagctgttgtgattccgcgcggtatcgcttagtcttaggagtccaacacgtgcggtttacctacgtatgggttcatatcaatagctcaatagctctgtttacttggtttcttgcctctatttcataaagccttggcttgtttcaatgaaatatacaggatgcagatgaccacaaatactttcaaaggctcagctgtgagttgtactgtaagttattgttcttataggaggtgagcaaagggggctgttggttcctaaagtatgcatttgatatggaaatagatgctgttagcaacgtaagattgatacaagatagactcccttatgattcgcagtgtttgagtattacaagtcccttttcggctctctggtatatttatattggctgtcttgtgaattttggctcttctatagctatatcccttgtcagatgcgtttgtcactttctctacttggctaggtattcatcattcagaaaaggtctttacatttgccgcaaggctttgttaggtattctgggccttgtccaacaaagggcagagccaactaaccctttaacaataacaatgagaatagcattcattatacgacttaacataaagaaacctttcaattcctttgacttattcttatctctcgggtctacacctggactctccggggctatataagcccttctctcctcgcgtcaacaaccggaatttgccaacattgtcctattctacacttccgaggtcggatattcaatccaataccaaataaaacccaactgtgtgagtcttgcagcccatatattatcatggcatctgacgagctttccgagcttcttcacaggtgggaacgggttgcagtactctgcgacgcaccccaggcatctgtgcagtgctatattggccgagaacacagcacttcctggataatgactgtagttaacgagtggatcaacgagaaccaccttatctggaccctatgcgccgccctcgccgattccggcctcgaccaagagtggacacgcagatttgacctctactaccgcagggagtggcatcgaattcagttgatggtgcaggtgacccagggtgctgagcggttgatgctagatattcgacccccgcctatgctgctcgctgtgtttgcccaccacaatgggtctacggcccgataccacgccatcatatccacgcctgctcgtactcgggccgacggaggccttctgaatctgttgcggcatgtatatcatggaggcatttcctcaactgatgtcttcgatgtagtcctctgtggagagggtatgactggaatcgcgccggagtcgcctccgtactctgctctcgggttgccagaccattccatcccagttttgaacctccctcctccatatgagaacactcccgggtctgaccggtcagagctcttttctgagcgctatcccactccgcctcctccctaccgcggtacttctcccgctccccctggttggactccaccatcctaatgatggcgtgtagcaggtgccttgcttgttggagggttggagcattatctgagcttatcatgagataggtagcttactctacatagaacgttttcttagttctgtctcttttatcagaatgaatacgagtggttttttttttgccaattctctatgtatacgtatagtatagtaagccatagctatgatagcgagattgaatacctttttgagcagtttatatgagaattctcaaagtttagaacattatatatctctatgcataagaaagtgcacgaactaattttgagttcaagctgtacttataggaacaaatatagggcaagaagacgaatgtcacaaactttatctgagagtatattgctttaatatccaaaaataatccaaggctatgtaggctggtcgcctatgccaaaaatagcgggatccaataatcgtgtgtagatcaagcggtgatagtatctccaacaagcaatgatcgagggtcagtggaaggcctaagtttgtcgagtgcatcaacccttgcagtgtaagactttgtttcaacggcaatggcttatcattcgataatctggggatctaaatacgtttgtccagctgattacaataactacaatgtaagtctacgtcaacattcagtcatgctcctattcttatgtgtcagtttctcgtgttcgtgtctcagttgaactttccaacatgtatatgtacagggaagaagtataagagagtcgtcaacaccatcaggatacgcttcaacagcaaacattagtccgacaaaattaaaatgaagaacatgtcaatttgcgctctcatcttggcgactgccacctccatcctcgctgcacccagcgctgtggtgcccgtcctagagccgctgcaacttacaaatctcaacgcagccatctacagcacaagccccccgcaaacctgcttcctctcttttgctgtcaaagacccaaacacgaatacagacaccaactgctccgcttactggtatgttccagtctatatcccaactttcttctctatctttaggatgccctacaagatcaaagcaaaaaggaaatgaaggatactgacttttagataggtccattggaatggctggaaataagacctacgactgctccgacaaggcataccagctccacctcccaaatggaatctatgatattgaaaacatcgatttcggagtctcccgcgcagacggctctgagactgggcggtcagttgtgactggcgacctgtggaaatgcgagaagcaggagtatcctaaggcacagtgcaagtgggatggtattttcagtctcgatgtgacttcgtctgcttgagtgagggtttgcgcgtatgtgaggagagaaggcagtattgctactagggctatatatgtggagatgctattttgcttccttgtttcagtctatttggtctaattggcatttatctcttgcgttgttgcttctaaatatactttaatctgttcttatttccgatctgagacactctgtagtgtagctggcataaatctaggaacagcctcgaaataccccgggctattcatgagaggaaaacaccaggtgaactaattaaaagtcctatatcctatatcgagaaattgaacactcagacttttatatcgttggaggtcaagtccaggccaatctggaaaaaccctgctgactcatcttacccacttcgggtgcccatgaggtcagacgcgtgaggtctcggcgctacaccaaaaaatgtggtcttgaattccgtcgatctttgcaatcaagcggattcttctgctcatagtctcgataggcttatccctgatgaaaaagcttgatgattcagcagcgattgccccctcataatgaccgataaggctcctcgacacctataaggagtagtattacgatattactttatggacgacgctacttgcccacggggcgcaaaagggcggagcgcttgcgatctatgtcgccaccgaaaggtaatatccacaatgcctgtgtgcgtccttaatctgattttgccgacagatccgctgtgatagaaatcaaccagcctgtgagaattgccatcttgcaggactaccatgtacattctctcggcctccatcccagcatcggaaaagtacccgacagtaagactctatatcattgaacccttctttaccaggcgcttacggtacgcagagagcttgccgataccaaagctcgggttcgggaattagaggccttgctcggacttaaaggatccacaaaacaaagccacaaagcgctagctatcccttctccgagcagaagctcttctccagcttcgcctagatccctctcggaagcatctttatcttatttgcccgatactcgtgattttgataccgcgttggcagctttccagtggcacatctcgtattgtgggcttgggggtgctctttcgacgcaaagggcagctttttcctctcttgttcaagagcagacaggctgtactttcaatgtggatgttttttctcatgaggtcactcaatctttcaattcacaacagctcaagtcgacaaagaaagtgattgggatcaaatggccagattctgctctagtccaacggtgtttggaatattttgatagaaatggtctctattctatatttccagttatcgatgttgaggccgtacaggttctactcaatgcaagggtcttagaccggcctccaaacatgactcgggcttcgaatcgggcttgtctagctgcttttgcggcaatgatcacccagatccaccgccatgagcgggctttcgcaggcactgacccggatgcttatttgcaagcagcgttaactctccttcctgaaatgctactggagccccctgatctacggaccttggaagcggtgacaatactagtaggttcctcgcatgtccagccccgagagtggatcccatgtcccagaagcttatatgtggccatagatgctctatatcgcccctcttggcagacctcaggcagcagagctacttcttgggattgcagtgcagcttatctataaccttggggcaaacagaatacaaacccccaatgaggtacacaggacagaccagcgtagccaacatcttcgagctctattctggcattgctatgctgtcgacaaagaattctctatccgaaaatcccaaccacccttgataaacgatgccgattgcgatctagatctgcccacgacatacgcccaggaaacctcagaacgtcacttctacatgaagcccttgtcatccaaggagcttcttttcccctcggacctccgcttttctgtgctcaagtccaagatcttccggttactttattcggtgcacagtcaaacactaccggaagctagacgcattcagcatatccgcgaactagaccaagaactgaacgacttgaacctgggttatcctgccggctgccggccggaggtgttcgccaccgagagcgcaccggactatctgtttcatgatctcactctccgcggtgtgaatatccatttggaatattactactgcctcggaaaaatccacggagcgagtagctcttgcaaggtaccttcgcagagctggtcgcctctcccatctagtgcagagctgtgctttgaagctgcaaggtgctcgctgatctacatttggcgagtccgccaattggtcaaccagcatacgttctggtaagggacttcgaaccttgtcacaggtatagatactaatccaggtctctttcgtattctaggcttcacgcgcaatttctcctcacggccgttttctcggtcttctggtatctcatcacggccccaaattcatctactttcacaagggatctcaagaccctggaggatatcgctgagctcttagctcacctcgacagatcgaccgatgacgggcagacttacccgccgttctatttggcacaggcttttgttgagaggctggtctcgcttgcacggcagtcgcggcctagggttgagggcacatgatagggttgctcaatactttcggttacttttctcttgaaggtagtagctttgtatatatacgaataaatgctattacactctgtggctttgggtttgataaacaaataaatgaagttccggcaacatgaggatttcccattcttcaaaatcttgattacaggcatctacatagcgtgctaagacctcgagctgagaatttgctcatctgagacacctcgacttccgaggttgagtcggaggttgacattcaggaaagtggagacctcgggcatattacttagcgttatctgtcaggcggtgagcctccggagtattgtaaattacctcattggcccgtcccggtactagcgcatacacggcggtatctctcgcatccgacggtgcttacgttgacagttggactaacctcaacgggaataacggcgatgcagatgaacttaaaatcttcaccgtaccccagtactccggagtgaaaagaaaagtgaaaaaaaagtcaaagcaactctctctctctcgcacaatcttctatgccactttgacgatgtaggtatctctacagtcttcatctctcctccgtccgatttataatccaaatgaagcggaaaagatcctacgataccagccaccgccactggagggctcaccgcatgacacctcaccgctgccacataatccacttgaactcgagagcctagttacccagcgcaatggttacttaccgataagcggatcagctgaaggatctgttcacacctccttatggagtacgaagtactccatccctattcccccattgcttcttgatgtggaaattatgtgggtcgacacgaccctcagcttcaacttccagccgcaaacatggatatcaggtgatcgtcgggcatgagtctcggtgagtttggttcgttaccaggcgaaccagtttcggacctatccccagaaggattaacgatggggccaaaatctgatgtagtggatcgcggtgctacgccagccactgcaccgggcaaccgggcaaccgctagatgggagcttgtgggcctcgcgccttttttctgcagagctcacacgagggttgcttcagacgatcctgtggtgatcaagtacgaagtaattgttcgaaatccaatgtgcgcttgacatccgtctgcgatacagaactattctgtatatcccgaaagagaaggaagtccttgaatcgaacacaatgactcgtgctgtaggtctcaaagctctcgaagacagcttcgattgcggcgttgccgattctcgagacccacacagatgttttgccaaaatacggagtggactattgttttttttctttttctttttcacaacatactatgtacggtcacgcttctagctctccggcatctgggcccggcaagccatttggatgatttggcaattcttagcgcagctgaaaaagtgagtcgcagctgaaaaagtgagtaggtcggaaacagaatatataaagagcccaacgcttccccttaattcttgaatcacgcctctcactcatatttgttttatgctcgatgctcttacgacaatcatgcgcggaatatctttaatcggtctgattcttttcctgcgccctcacctcgcgtacacggagaaggtcccagtgaaaagcattggtaccagcttcaccatcaatggagacaaattgacatggcctgatggtcctttcacgggaagcttgacctgcactggccccactaaggtcctcagcctgagttcttgccagcggtacggcacctgctgtcctcccggcaccacccttaagggttccccggataccgaatggcattgctgtggcaagggtcacgatgtgaccggctctaagaatgtgggctatgagtgctgtctgtggggttccaccttcgacggcaacagctgccagagagaggaggtgtgccacaacggcaagcatttgatcggtgggaaatgccagtgcccctctggtcacgaagaggctgccgatggcacttgcaagcctgcgaggtgtcaatcaggcattgaaagtggtatgtcaaccctcttaactttttttttctttctagggcaacacaattaacaaatgtgcaggcaaatgctacttcctcaagggacgatccggcaattatttgacattcaacaaccaatactccgaactcgaattgaacccctatgtcagacccagcaagttccaattctgccgaaacgaaaaatgcactcctggcctgcctatcaaccccacccacgagttctacatgaaggacctccacggcttgctgccagaagcaaccgacgccggactgtggatcgacaacacaaacaacggcggttacattggcaagacttacgactttgccaatgctggaaacttcttgattaccaagtggcccggcggcagatattgtctcactggattctccgagggactcgcgcaggcttatcctgatgtccttcctggtctcagcttcaatagccgtgccccggatgcgtgcattgaattcgagctcaccgaggtgccttgcaacatcagggatgatgcgaacaactgcatctggggaaatggtgaacggtgtggccccaagcccgtgcatcattctgtagtttaagaagatgcatctgtgtcactctttccttggttatttttacgtctaccaatgttcttcctatgcctgagttattaagttgagaggttttgtcggaattttctttctgccgtgttcgaatattgttatgctacacttgtatcttagcaatcagcgtttgtattttattttattgcatacaaatgactatgataagcatctttagtagtctatcagttcgagtaaattgaaatcttccatcagtacggaatatagtatcaaaaattgcattgccgaactccaggtatatattgcggcctagtgctattaatttccccgaaactcacaaaagcgaataaatatcacatacgaagtatcaagaaataagaaaaagtccacaagtaccagaccattattgttatattccaattaaagtatagtgcggcgcagtaacgcgcggcgaccaggttcttatacacagtaggagtattgggatggccaatttagattaacctgcgctattaaaccaagacatacataatagtgtgtatttatagatcgggtcaatatgtgctcgtagctctagacctcaaatctacaaatgtggcttcgtgtaagtaccttcgtgctatctggcttttccaccaatccctgtcgtcaaagtatacatctgctttcccctcttttcccttacatattcctattcgctttgtcttttcttcctccttctctttctcttcatcgttctctctttcatatgtgactgcaattatttgcctctaagtgacaggccacttcctaaatgaccggatactataaacctgagacactccgggttcaaccgcgacttacctggacgttgactccgattgggggaataatacgatcctagttgccctatgatacactagtttaccccaatcttcaacagcccggccgggctagctcaatcggtagagcgtaagactcttaatcttaaggctgcgggttcgacccccgcgttcggctattcctaaaaccaaacctgagatttcttttttgctcttttctttttcggttctatttatagaagagcacgtcaagatacatagtatcgacattttaaagttttgctatgcccgttgacggatggggtagagtattgttggtatctggtttgtttaatcccgcgtaacaggtatcgaagaaaatatatctatcgtttattgatgcaactagagccgtttatctctgtcaactatgtacaacacggccccacaccaagacaactcaatcatcagtcatatcgctacaaggtataaataaaggcccgaaacctctgcgcatcgggaaatgtaacgccccaaattacaccaaaacacaatttcacaacttcgttccctcgcgtccaccgtcactgggacgcctgggccgaagaggccctgaagagtggccggtagcatggctcggcccagccgctgacgatgccatctgggtccgtgttccttcgttttctgtagaattggtgcgaacagtccgtgtcccctggtgaagacgagggttcatgagccactggacttgcatgcgcacactgttgaccgccgcattcgtgtgggctatgtcttccttcatgcgtagacattcattcatgatagccatgctggcgcgagcatctaggtctgtgatagcatgcgaaagttggttgacctcctctcggagagattcgtgcagtgaaagcaggtaggtcgtggcattggatgagaatacactcgctgcaatgtctgcaggatcatcggtatggacgtcaacacgagtggaggattgctgttctcggccagattgggtagactgtccaccgctttgactgttcgcaaagcgcgtggattcgacaagagtggaccgaatgttggcgagtccatcctcgaatatctcattccgctgctgcaaatgtcgcatgcttgattcaagggaattgagccgggtattctgcatctcaaagtatgggcccattgcgactatgggacagctttgctcgtgtgctgcaatgtctgcccgtcggatcttaactggacatgcgtatttggatgcggcgcaaggaaccgcaacctccggacatgattcaatgtgttcccgtagcgcccccctagtgacaactgtctggcagtcggcacatgtgacctcaagaactggacaaagctctttctcatgctcctaggcgtttctagtcagcatctatataatttctaagaggttaaaaatgaaacaaacctcgtattcatgctctagaatatcctgttcgcaataagagcaccgtcgcactctatgaatacacttctgatccatcccaacgtccttgcttcgcgtcatctgatcgcatgaattatccggacacggcaatagccggtaaccacagtacttctcgacatgcgactggacatggcctcggggaatgatctcttgacatccctccgttatcaatggacatcgcactcggatctcgtcgcacatgttgatcagcaggcggggcacgctagttgacactacatgagtgggattccggcaagaaggacacgggaagtcgtctgagtcggtcgagcggaacgtggtgatggccgaactgaggcagctcccgcagaagacatggtcgcattgtagacgaacgggttcaacgaagggacagtggcagatcgggcacataagatgcgggtcgtactcggagacgagatcaaggctgcggaggtcgattagctcgtcgcagttgcggctttcctccatggctataaagtcttgtagattcatgttgtgcgaattccaagcctatcacgggggtcccaagaaaatatgcaaggtaccaacggacttaaattccctatgttgttgcttctttggaatgcggaatcagtgcgcggattcagttttgcgctagataccgaggtagatcgaagagtctgaatccattaggatgacactcagaaaacaaccaggtcagcgatcagagccatatgcctgcaagacatagacatgttaagattgaactgaagagaaggcgggatgactgcgggggatcaaggagaggcaaaaggcggaaagcggttgatccgcactcgttgccgcctattcctcgttttaccatctccactttcaacctcataaacatctcaaacagtctgactttatcttgcttggctgatcggaggtctttctccgtacggaccgtacaaacgcccacgatttatacatctcaacaggctgggatcccacacgtctcatcatgacgaacccttcccagctcttcctactcgccgatcacatcaaattatcccttttggagcgcgaaagagcaatctcactcgatctcgagcctaattcccaagatggagagatctcttggtctctcgagtccctccgagaaagcatagaggcactggaagccgaacaaacccggctagcaaactcgcacgacagcgcaggcgccgccgccctgaaagaccaactcacccctctccaagcccaatataaagacctgtcgatccagttttacggcgcagatggcgagccatcgagcaccaacacgacgcaggcgtcaaatcccgctacccccgatctcaagcagccaattccccaacatccaccttccaaatccgtccgcttcatggacagctccgcagcagcggcagccgtgcaagatgagattgacgaggaagacgagcgcaaccgcagcaacctcttccgtccataccgcgatgagccatcgccgcgactggatcactccaacatggacaacctgcagatttacgaccatcacgctcaaaccatgcgcgaccaggatgaccagttggatcggctgggtgaatcaattggcaggcaacatcagctgagtattcagattggagatgagctggatggccatattcaacttctggatggaatggatggggacgtcgagcgtcaacagacccgactgaacggtgcgagacggcggatagataagatccgtcgaaaggcgagcgagaactggagcatgatgactatcattggattgatcattattctggtcatcttgattgtgattctgaaatgatacccgatccgggtggttaatttggatggctgttcttttgtcgctattactcttttacattttttctttctttttggcgagcgggcgtttgcaactttacgcaatgcgggacgattgattctcctgatgtcttttcacagtggctcgaggcattataaagcaattgactcacttctagactcctggttggattcttgatcataatacatctacaacccttacccttgatcataacctttatttcatatccaattatctgtgagacagaccaagtgtgaacattctcattgaatgcgataaactcttaacagctcgactccaacagcctcacctgtagactgccccaataaaatacacgtgaaataaacgagggccgtgatcgaaaagttccaaaatgccgataactttcacttaatgagcgcccttctggctccgttgcttcgcctccttcgcctccttctgcgcctcctggaaaggaggatcggcatctaactcaccgcgatccgctttgacctgaatgaatccagtatattaggtctgatgaaagatgaaatctaggggctggtacttacctctgcctcgctgttactggccagctcgaatttccactttccactgccatccttgttgttcttgaggccttcttgcttatgggattcgtagtggtgggagagatcatcgcggcctgcttgtggttagtacagacgggagaagctggtgatagtggtgtactgacccctatcatcctctttcaagctccggactgctgaggaatggaacgtagaagctggaacggccaagtttgtccggataacttggcgagatgaggcacggaaggaggtgaggaatgacatgatgtaggtgagatgagtttagatggaatggtaagagtaagtggaagacaagatagatttgggatatatggaggaaagggatttgaaatcaagtaattggaactctcttccgggcagacgggacatttaagagcatctggttcggccaaggtgacagctcctgatgctatatgacatcatcgagttggtgggtcagttatgtcaaaacaaggacatgtgaacgcatgtacaagataatatcagttgaggcgattccttctgagatagatatctgaagatctggagctttggagctttgccatactccgttggtgcgggttgttcttgtagacatttctacatctatagaatctccccgcataaagatgtggagaccttccgacctctaacttgatcttgattttggaatagtcatagtcgccaatatgattcgaaggctttagtcaaaccgacttgactatcttaggtatagtttcctaatcgtgagacgggagccccggagtagcgaagaagattcgggaccacagatgtgatccagatgcgggaaatacttcctcactgtcgatccttagtgccaagtttccttcggcaattatggtcgctcatattcggccaacttgattcccgtccatacttgaaaatatcggaatacatggatgttggattgtttgttgggatagtggtcgtgagcgaagtaccgatgtggcagcattggaggacgcactgacagtaggagatgtcaagagtaggagatgtcattctcgacccacctattattgtctggcaagaaacttacaatctatctctctgtgattggtacatgcgtataatgcctctaccacttctttgctttcctgaaatattgaataccaatgtacatttttctagacgggtttacgtggactgtgacaagaaaattaagtctttcagctattgcaagctacctaaaccatgatagatctaagtcagcgcattttctaggactgacaatataaccgctgttttttcagaacttcagtagtgctgacccttttgcgaatgaggtcgagctaatcgtcttcattctgtggaatggagaaactctttgtgtaaatcaatagatcttaaagccaatagaacgtgtgcaagggactctctccgtcaccttcaagggaaggagatatcgaaatccagagcataatctgatagcacatagtctggagtggctagacccgggctttgtggaatcatgattgaagcgacagggaaccctacatgtagatatctgggttagccatattttgagggacaattggtagttgagaaggagtgattgacgtggctgaaccacttcgttgggctgcgcatgacgtgacctgttcatcctgggggcgacaagtgaccgcgataacggtcgatatcctttatcacccctgagaacaacatagttctagatctgactatagagagaagtctatggaggtgtcaaggcgcgtggtgcgtggtatatggtgcatgatggagattgaagacttcagaaagctacatgtaagttgcagagctatgaaacctgacatagcgaagtgctgggtaagccactccaatttggtgatttagaacaatacgagcctcagttgaaccaaatgcgaatacctatatatactccccgacaccttgctgctttaaaaaaacactttcttgtttataattgtgttgtcaataggctgccgtaggttgtttgatgtttcaatcgttgctttattcccaacaaagatggggggattaggtggtgcatcaataccagacgtctcataggattggccttagtcctcagcgaacttcagcggaagacctgcctaggccgtagtgttgtgttttgaccactagttaaatatttcacaggtattcctatgcttcatctaatataagtctactgggaaatagttcattgaggaaaatgaacaatctatattctggtatttcatatcactctatcaatcatgcaacttaaccaaagacaaataagcagctaaatcacggacaaatatatgcagctccataaatcacaaacagctaacaagatcgagttatatacgcggcgaagacaattgaacagaccgggggacggttgaatggacgcacaagattcctaatgtttatacctgtctccaagctttgtcttcaatatcaaatcgtatctgcataatagacctcttccagacaaatattctggtgatacgatgtgtacctctggggaatgctgacaaaacaatagcagccactcctttcccaagctctgtgcctagaatggccttatattcgggggtatcgaaatcccaggccacttgctttactgatgctggagatagcaaaaactctcgggaattaggtggttgagttttagcccaaattgtttgtataaagtccttggtgtccgcattgacaacattctcgagatagatatgtctcaaggtagtccgggcgaagtgaatatcgtactgtgcaagggcgacttgactccaccaaggtccatcgtatctctcaacatttctaacgataatcactcctattgcagtcgaaaaatgatgaaagttagttccgtgttttcttattgggtgctcaatggtcgatctctttgagatcttgacatcgtggtaatcttcattacctacagggaggccacacctttcgaggtcatcttgaagggcggggggtcttgcggcccagtggtcgaagtctactttccatcttttgctccgcggtttagcacgggttaagcttctgtattcgaaatctggtgcctgaactgtgcaattgggctcgtctgcatcatcgatccatctttgtcgcaaatctccccacatctcacgcctgccatactgataaatgtttaggtcaacggataaggagcgaacttgcgagggtgggacaatgggattattggcagagaaggcagggtcttgtagatctatcggggcatcgccaggagagaatttgcggcggcggcagataccgaaacaactcaagagacaacaattcgacatctctatgagtatattagattgaattaaaatgtataaaactagagtatcttgagtggtgtattgaatgatgaactcttacttgtctgtatgataccgatagaggcttatatagatgtgagttaaatatatggcgcatactcgaccgtgagtatcgcgttcaagaatatacaaaggggacaacaagaggacaggaagaagaaacatcgttcacaaagagtcgacaaaaatactagcactcgaacaagacagacaatgataatggaagctgagaccaagccccaaatagacactaagaagtggacaaagaaattgagccaaaaacacagagaacaaggagcacaacaagtgtgatgggaatagcaattagacggactattgtcaacaaagagaacattgtcgtagaccaacaaaagagcgtggataaagaagttaaaatgcaagcatacatgtctcgatctccaatactgaaggccaactaggttaaaattcgagatcggcattctcaggccgaaagatgatcattatatagcccggtatatactctgttccaaccttatcgctgtgatatggacttggctgcaaacttatatccatccgctattgctgcctataaccttgcatgcctgttgacttgtatcagacttctgtatctcatttggaagatgtcgaattgcgggataaaatcattcgaatcaaacatgtgcatggttattcaggttgttagcatcttgtgctctaggtttatgaacctatcgcgggaactttagttattctatggagcactacccctgaactagatttaacgtcagcgggtacttctgcagggccatttctccgaggcttctcctgtgcccatacgcatctaagaggaaaggggaaatgacactgccaatcattgccaacgcacatgtgcattagcgtatattgtagtacctaccgtgtattcttggtggggaacttggtattaaaactcgtagatctacctagaattatccatatttagtaggatttagttatgccacggggaaggttaacttggcaagaaccgggtagtgatatataactattttccaaatcaccttagaaatcctattaattgctttagtatatatcgcactgaacagccgaggcatcttttcaaatgaagaccatcttcctaagtgttcttctgccggcattagccaaagcgacggcaacaagtggtaaattcactgcgctgagcttcaacgtcgcaggtctgccatcactcttccaatccaacgatgtcaatggcacaaagagcgaaaatgccaagcagctcggcacttacttctcagagtatggctacgagatcatccatatgcaggaggtattgctccatcgagtcttccatatatcaataatctaacaacgctctaggatttcaactatcatgcctacatctatgaaacagataaccacacctaccggaccgctacatctgggggtgcagccatcggaagcggcctgaacaccatttctaaccacgactgggtagatttcggacgtgtgaaatggaacaagtgctccgatgcatcgggctcagactgtctgaccccgaagggcttcacattcatgcgctggaacccggccgatggagtctatgtcgacttttacaacgtccatgccgacgccgggtgagtaaaagccattctcacattttaatcgatccaaggactgacctccgtcaagaatcgaggatgaagacgaaactgcccgaaactccaacttgcagcaagtcgcagattacatcgacacttggtcgactggtaatgcagtggtagtcatgggcgatacgaacagtcgatacacgcgcgccgatgatacgggcatccgcgtcttcaagtctcagaatagcctcacagacccctgggtcgagcttgagaaggatggtgtctaccccacggttggagcagatgccttgctatgcaataacccgtcttctgtgcagacctgcgagacggttgataaagtgctgtaccggggatccgaagttgtgacgctcaaggcagacagtttcatctatgacggtgggaagttcacaaacaccgattccgaatatctgggcgatgttctctcggaccacaacccaattcttgtgaacttcacctggtcgctttcgtcatcgctgcgacaaagtcagttctctggaggtccgcatggggtgtggtttaatgatctgccgagtattccttcatcgcctgctgtttctgtgattactttctctggtgcggaaaggttggatgccgttgctttagagttgaaggatggcacatcgttcagccatggaggaactggtggcactaaggtctcccttgcactagactctggggagcattggacggagactaagctctgtactgggcagtatgatagccacactcgcaacttttatatcaaggctactaccagtactggtagaaccttggaggcaggcacctcaactgataattgccagacatttactgtctccgatggctttgcagtggcgggtttcatgggacaagccgaggacgagatcgatcaattggctttggtatatgcggcctactaaggaccaaggaaaacgattattccagatacgaatctgaatatgcagttgtttatttgccattttggtcaatcgtatcagatcatttatgcagtgtatgtcccaaacgccgaggtattccgtagaacccttatccatatgcaccgcgctgtgtaaataagccaacaaaaacgagcactttaatcaatcatatcctctggaagaacatcatccgggttctccccaaccgcttgtccgaccaagcgcacgacgcgcttgattgccttggacgcaggactgtcagggaagttatccacaaaactctcaccaaagtcgcacgccatgccaacgcggggatccagaggcacggcacctaggaaaggaatgcccattttcttcgccagccggcgaccgccgccagttgtcgctcggaatatctgcgactcatgcgtgcagttaggacagacaaatccagacatattttccaccaagcccaacaccttaatgccagccttgcggcagaagtcgacctccttgcgaacatccagcaatgagacttcctgtggggttgtcacaacaacggcaccgtcaacgccagactccttcagcaaagagttgacggacagatgttcgtcagaggtcccaggaggcgtgtcgacaataagatagtccagctcgccccagtccacatccttgaggaattgcttgatcagtccgttctttttgggcccacgccagatcaccgcgtcgtcacggttgggcagcatgaattgaacgctcatcgcgccaaggttatccgtcacccatacgggactccagccggcattgctgatgtgaatagtctctgactccacgcccatcatcttagggatcgacggaccacagatatcggtgtccataatgccgacggtagagtctggatttgcggcgaaggcgtgcgcaagaagggtcgagaacgtagatttgccaactcccccctttcctgagagtactaggatcttgtgtcgtatttgggagagtcgttcggtgatgatcggaatgtcggggtcgggacctttaggcgcggtggcgcagatctgttggttcgggcaaccggcacaagcatcgccttggccagcttgctcggattcagggcctgggcagtgttctgtggagagttagtgtgtgtattgcggcaatggatttagagcatgcgtacctggttcgggagcgacgaggctgggcgtcactttggacgacactgcaagggattcctcatactcctccaagtagggcgccattttggattgctactctatgtggcaattgaaatgagagcaagcgcggaaaataagaagataattgttacgccgttgcaagaaacagataaattcgacgtccggtggcggattgatgcttgataagcggagatgactaaaaccccactgcgattggcggggcaaggcacatctgcggtgtcggagtgtgaaatatctcatgttacatattgatatattgatcgccatagctgaagctataaagtactggggggaataaggcattttaaagaactagcttctgatgatacataattagttgactatctcttatgtccacttgccaagccgaccagatctgtataggatacgagattacttgatcgggctcgcatcactcctttcagcgcaagaaggtcaatatttatctgccttccttcctgcttctcttagggggtttgtttgagcgcagacccggtcgtgttgaaaagaacctcagcgctagccaaatctacagacacaagtttcagagcgatagtcgcaaacacttcagactcatgtgcttctttcctctaagattcgaactcggcttttttgcttctgcagcatcgacatgtgcttgattcatatgataatcaggatttgagacaaattttccctgcttagtctggacaattgcgcgatattgttcgatataaacacagagtaaccagctcagattgcagctcaactatctaataacacgcattgaagactgatttccagttctatccgagcaggcggtcgatgttgcagtcttacgatatttcaagccttgtttgaagcagctcttcgcatctccaacatgcctagcaactggtcggactttcgctttctcattttccagaatttctgtttctccacagatgtagacccggtcatcggatccctcgcggacaaagcactcattccgctcatcgaggaggccgaaagcggtattcttccgtaactcatacacactctgtacctcgtggacatatctaaatagtccgtagggttaaagaatttcgggcctatcagaacctaatggccagagtcttgatctagcgcttccactgcagtatgatggacgtggctcagcgcaaaagattgcatccagcatgctcctaggacaggctgcaacttggattagattatcccccgttgtatatcgcgtagtacatacaacccagtgagataagtaagcagtgcactattatgagtacccgttatcaatctcgaacaacggcaacaaggggtttcaattctcgcctggacaacaaccaggaatttggattggatgaggccaagtacccactggccgtggatgatctcattcgcccgtggaacttgcagacacgatcacaatgcattttatatacgagcttgggctcaaagggaaatgcgcatctcaatctaagcaggcggtaggtgtacaccggtatgtgcacagtgctactcggacaactcgtacagctcgtaaaacctgccgcacttgccgcactgcacgataccccgctgttgatcggtgttgtatactacccatgggcaagagaggaatggatagacagaagacgtggtgtagctaaaagcctattcaaaatcgaatcagacgagacctttcccaacaactgtactttatcgcgaagaaaccgactaagaccacttagcgttggttgatttaaagggccccatttctttcccattccgctccattcggaggcccgcatctctcgagagacttcacgagtctcaacggttccactcttttgtcgggattggtataaataagaactggtctcctcggtaaatctttctccttgtctttcttgagaaaaacaaacaaaagagagacctcccattgtccggaccaaacccctggacaacaaaggtgtttccgttccccccccccccaactgactaagcatagttccgcttttcgattatcacatgcttctgccgtcacattcggcctcaacagttttctctctctcaacacccttgtagagtggaacaccatggatcaaggcctttcaacaggggcccatcaagaaattgatgggttacgtgagagaaatacacgcgtcgattcaacaatcggtcgcgaggctttaacagcctttggggaagtgcagatcaatgataaagatggcaaagaattgaagacctttgggagaactcccgatggaacaggtaagcttgttatgtattaatcatgtttgtattcgaaggtcttaatcggatgcacctaaacctcccgttgtatttcatcgagcccgctgctaactggatccgatgtatcagtgtttacggtccctcggactcatgacatggtctcccagttgcttttgccgtccgagccaaagaatttcggtgatcttgtggtattgattctattggcgggtcatattctgtttctctgggcacttcccaagggtgccaaaatcccggtctttgccgccacctacctcttctggcgcctggcctacaatgcaggaattgggtggctgcttcacaatcagtcgcaccacaagacactaattcgatgggccgagaagaccaaagtgtttgtcaatccagccactgggaagaaccctcaccctaaattgtataattggatcaaacgggaattggagaccaagatcccgcaggattactcgttcgacaatgctccaattgaatacaacacctggcttgtttttagacgtcttgtggacttgatcctcatgtgtgacttcacttcttactgccttttcgcgatagcttgtggtcaccaacccgttgacgagagtattctcatgacggttctccgatggtccgcaggtattgtactagtgctgtttaacctctgggtcaaactagatgcgcatcgggtggtcaaggactatgcctggtattggggtgatttcttctacctcattgaccaagaattgaccttcgatggcgtgttcgaaatggcacctcatcccatgtactcggttggttatgcaggctactacggaatctctctgatggcagccagctataaagtgctgcttatctcgatcattgcccatgcagcacaattcattttcctcgtccttgtggagaacccgcacatcgacaagacttataacccgccaccacccagaaagcgctctactacctgtgcggattcttccacattgcccaccgatctagacactccgacagcgccaactccatctgaagaccagactcccaacgcgacatcttcgtattcggccaagccgccgcagtccgttcacaacctcctcggactgcacaacctggatttgtatagaaccactgattcatcaatcatgctggttcaacttcttgtattctctattacagctttgacaccctctacaccagggtatcagttactgttcgtggtcctcgctgccgcttccagaatctggtattccgtaggcattgggtatatccttcggaaccaatccaattccaagtcttggacaaggcacttcgtcaagtatggtgacacgccgcaggaagcgtggaaccaatggaagggtacttatcatctcagtatgatcttgtgttactctagctttattgctgccgtgtggaagatgtacacattcccggccgattggaactatggtctggttctgttccgacatgtgctcggagctggcctaatcagtctgcaaatctggacttccgtcagtatccatgagtctctcggtgaatttggctggttctacggggacttcttcttcgatgactctccaaagctcacctacaacggcatttatcgcttcctcaacaacccagagcgcgttctaggtcttgcaggcgtgtggggtgctgttctcatcaccagtagcggagccatcgttttcctcgccttgctgagccacatcctgagtctggccttcattcaattcgtcgaacgccctcacatgcagaagctgtacggtcgtagccttcgccaggatgcgggtctcgttaagagtctgaagcggtccctgccaccctctctcaagcaattacacggaagtgttgacaagatgttcgatgactcctttgagttcatcgaggagatgcttgacaatgcccggcccaaactagccgcgggagtgaacacctttgttaaagataccactgcgctcttccagaagtaccctgctcgcgttaccatctcccgaattgatgcagacctggctggattcgacgcccgcgattattctctgtcggttgaaggtaccagtgctctttccttcgaggagagcgaaaagaacaagggccgtgaaggtgcaaacgcacgcatgcccctggaccgccgtggtgatctcaaggacttgacatttgaatatggcgccccgatcaaggtcaaatggactgccccactccaccacagcaagaaagattggattggtctctaccgggtcacagacaatacctcgcgagaggtcactcgtgtttcatcgcaaggccgctgggtcgcaaccaacgaaggcgcatacgacaactcgacctgcgagaagggtatcctcactagtgatgttgttacctcgtcgtctgagcgtcagggccaggacccctgcgagttcgcatctggtgagatcgttctttctggcaacaagctcttctggaccgagggtgtctttgaactccgctaccaccacaacggtatgcacaatgtcatggctatctcgaggccatttgagattcgtattcgccggtcggatgaggatgaaactatttccgacggttattcttttgtggaatcggctgttgaggatgccttgttgcccgttgttcgtaactgtttcgatcgtgatcctgaaattgccccagagactgttgatgagcagttcggtagccttgttgaacgggatggcaagtttgccaaacgtgttgtctttgctgttcatcagatgtaagttctctttctcaagatcatttcaatcgttgatcatattctgacccttcgtcatgcaggttcggtatcgagttggcagctgaggttgtcaaggccgacggcaacgtgcggaatctggcttggagaatctgcaacgccaagaaagttcttgtaagtatcaaattgcaggctgaaatctgcttgttggaccaaagctaactcgtcaacgatgcaggctccctacagcatgtcaagatccaatggaacgacgacaccagtcgaggagagcaaataatgatccatcgaggcagattcccgatacgtcaaacccagccatgcacttatgttggcagacgacgactcgtgttgaagacacgcctcaatctcaagtggatttggcattcgacagttgagtgctttacagcaaaaaacaaaatcaccaaatcacaaaaaaaagaaacatgtcataactaggagaaatcatgtgttgaagaaaagaggagttgtcctgttttgcttttcttgcctcgcatgtaaatgatgatgcgaggttcaagataatgattcccatgatggttttgtttagatttcaggggttgggtgggttgcagtggtgattttcatgtgtcttgccttttggggacgatttggctgtgggctgattactttttcttctctacttcgtacatagcttcaagagaaatctattgctttttttgtgatcattgacttagttctctaagactcttaggggaatgggagacataaaaccactcgcaataccaatatatcggggcttgtttgatagctctgaagagtatatgataacaagtaactacataagggcctccaacttcaaccatctgctcttagccttcggctatcagttctagtacgcatcggaaaatagacccggggagaaggcatagatgcagcccacaagtcgtgggataagcaatcaaactcatttactcgactacgaagatttcatgacgcagatgtttgctaatatgcatgtattgaactaaactatatattatggtatcgaattggagacctaggcaaagctttgaatgctgtcagcgaaagtccaaagacccgaaggagcgaaacaagcacgaatagcttcacaattgcaagcaaaagtagaagcatatatagtattcagtcaagccggttaactcatcccatcccctgttggcccctcgcaccgaactgtcacccaagacggataagcagcccagcattaggaaaccaacacaagccaagtatagcagtaccatgccgcggacaagacaacaatgcaaagaacgtaatcagacgacgacaagcccaaagcctccaggctccacaaccttcctccctttcacacccgaaggcacgacaggtccagtataagggagatggaaaacagtggatcgacgcctgtattcctcacaacgctgtacggcttgggtgcaacctgaggggcggtcctccaagaggtcgttgaatggatagactggttgtcatcataatagctgggggagatgtgcagttgaaaaagacaatgatgtaccttttggatatatgaggtagaggaccaaacaattgatggtttacagctagatctttttgagttgttagcactcttgtcactaacagggtggttgaaagacaatgataatgactcaagaaggatcaggagtttttggtaagtgttttgttatcttcaaaaattttgcagaagcagaactgaaaaggtttctcatcataatgagtgcaggtgggaaagtaaagaaaaaaaaagaatgttcttaccttattagttcatatttctcatgtaatccaaaacaaacaagagtgttttattcctgtcttaagcaattgttagtcgctgatgcgtagcagtagaatatttgaaaacaagagtaaaattgttgtcattatcagatggtgatgcatgtttgttcatggcccattttttgtcgccaaacaggagttggaactctctcgatcatgtagacagggttggagggtttgaagggtactcacttatagcatattagtgatggatgtagtaaaatataacaactatcatcaagattccactccctcagcattagaagaagtttcctcagtaaattcagagtgtgtgaagaagagaaaggaaacggaagagcaaaaaatcgaagaaaagtcgccaaaaaaccaaacggcgctaggcggtggggcctacaaacagtgcaaactcccaagatttccgtttctgggactttgaccaggatctctcgacagcttcagttttgcgccaaatcacctaaaatggctgatagaagacgtatcaatgggccacctggtggcacaagacctccagtctatgcatccctccaagaatcctcgacaggcgtcgcaaaccgcgcccagcgccagcgccaacccaccgagctacggaaaatctgtatgaattgccgacaagcttcttgttgatcgcagctaaccttcaatgctctagttctcaaaacaggactgattccaaccgcctcaggctcttcatatcttgaatttgaaccatccgcttccctcgccgctgcccgctccaaccccaaatctctgatcccgccctcctcagcactcaaactggcttgcactgtccacggaccaaagccgctcccccgctctgctgcattctcgccgaacctcgttctcaccactcatgtcaagtacgcgccattcgccgcccgcaagcggaaaggacatatccgtgatgccagcgagcgtgaccttggcgtacatctagagaccgccctccgcggcgcaattatcgccgagcgctggcccaagagtggtctggatatcactcttacaatcattgaagcagaggatgaccgctggtggggtgatgctcccgactcgcatgatgcgtcttggggaatgatgaacgttctcgccggttgtatcacagcggcttctgctgccattgcagatgcccacattgactgtcttgaccttgtatccggtggtgttgctgctcttgtctcggacgactcaaatcagtcggcatcatctgccccgcgactcatgcttgacattgatccagcggaacaccgatcgattttgtcggcttgtgtggtggcgtacatgcctgcgcgcgatgagattactgagctctggcttaagggcgatagctcaagggtggaccttgaaaaagacgatggacgtacgggtcatgaagctttgatcgacggagctgttgatgcggctcgtggcgctaatactgtcttggctgaggctgtaagggaatctatcgctacgtcttttgctcgcgtctaaaatactcacaacacataacgaatgaatgaagtttattggctctatcattaatgtagcaataggctaatttttgtgttcctatttaccgatccatttgaagctgtgtcacaagactagaagatgccctagaacgcaagaatatagttatctagagtagtgggtttgtaaactgatagcctaagattttaacaagctactaggtgtttttactccgtacttgcttttataatcctacctttttgcatgtaattctccctcggtgttgttgtcgtccaaaataggtaggcttcattgatatacaacggagactacaacacatgatcgcagtaccatactccgtgggtcgcctttcaataatggtatgttgttagttagagtatggagtagttacaagacaataatttaattgactaacataaatattttcatgttctaaaaaaaactggtcaaagccaaaaagaaaggggtagatagagttggacgttagattctcccataaaacaaattatgccgatctacggagtaggcaaggcccatcggaatcgatcgatcgtgggacatcggatctaagtagttcgtggcatacaaccaatgggcacatacaatatgttgaacaaagtatgaagtactaccacaataggacttagaaggagtagataactcctgcagcgttttggcagggttcaacatgaaagatcgacctcaatttgcccctgagagtgaacatagtacggtatactagtcatgtactccgtaatacgtacaacataatatagcgaggaggacgctactgcggaaaggaatccgagacccgctccagagacctttttgctctttgtccctaaaaccaactccaaagctccatccgactttagcactattcaaatagccagagcccggccgtaaatggtacagcgtatgtacttggttcatgtgttcccgctaagcagacggctcacggtctggcgatcacctcatcacaccaatgaccggcttgcgcggaaattggaagctccatcgcatgccacaattcaagccccgaatccactatcgttctctcccgttcgccagaattagacattgaaacccctcgatgaaccgctgattggtgcacgatcgctggtggatgctgttggaactcactagagcagcttctcgcccatcgaccagcgatatggatcctgtcaaaaaacttcacgtgtggatcacagctttggatggggcagcctatgatccagtctgaacgttttcttccacgcgctgcgaaatcgactcattcagatctagttctgggtaaccttttttttctcgagattggctcgaaaagaaagggaaagactcgactcgagctgcaattgccgaatcatatttccaaacaaagaaataagggcatacggagtagatcctgagaaattcagatcttaggatcatggagaagaccgggtcgctcccccctgattcagacacaagaccggcgatagatctgcactctgctgtgacaagatacatagtccgtactggggccctgttctactttttgggacttcgcgacttgactaacttgactttcttcttctttttcctgccttctgatgatatgacacctgaactgtgtgacggtcttcaattcttccagtttagatgtcatgacatcaacttgttcaattctttatgaccgctggtcttgtcgctctcttaattattagcttgactttattgtatcttattttcctctcgtttacactaccgttgtccttcattttccaattgcgcgccggttttgcgcttgatatctacttcatttcttcaagatggtgccattaaagaaactattccacacggacaagtctctttctcgttcagtaaccacccctggacacgaggactgtggaatagacctacgctattttcaaacggcggttgactcgcctacacgaagtccatttgagggtggtttcccgtccagaaattcgcagtcactagatgtgggtcatcattttgatcagatcgaaaagcacttcgaagatctacatgatagactggaacggccgatatctcctcaaccccaattgcagcctctcagcactcatttcgcgctctctaaatctcaaaatggccgacatatcgacttgatggaagctctgttctccacggatccaacaactaccccggaaccactttctcctcctgctagtctatacaacgaagatgttgcggaacgaaacatgacccggtttatacggattcagtaccgcaatggacttgctagctctggtatactttcggccctataccaagaggatgtggccgacagaaatattgcaaaatatagcgcacctgctcgccctttgtctcacttaagttctcggtcatcgccagctgcgcctggtacggtacggattccagaaagccaacagcgcaaagacaggaagcgggaaccagggaagcctagctggacgtcggcagaaaatctacggacacagccctcgccagatgatggctcgggtacttcatctccacgatcacagtcgcagcttggcaatcgcctcagaccccagagatctgcgccgagcctctctgcggacgaaggcgttgtcccacaaggaaatgcacccccagctcctgtctcgcgtttgggcgttcctcctgcctataaacaaggcaaaaggtggagcaacactcctctgcctgatagtcctacaattcctatccctatgggtgaaagtgacggcaccgcggaggcgccacgaccacctgctacaatagaccgcaggacacaaggatcgcttcctccgccacagttatcagaattagcctccaaaaagaatgcacgaggactttcaatcaatacaaaattagctgccaaaggacgcccaaaaattgcgcatcgtgccatccagccaccaacaccctcaacttacgaattgacgcaggcacctagcatcgcagaggtcatgaacagtcctctgcctgttcccagcccaatcagtcccccaaaatcatctccacgcttcaaaccctcggacgtgatggaatttttcaccaaggcttataagtccgttcaaagcccccacacaacatacgagacactgcaggacgccatagtccgcgaggtcaattcccacgaggcattccgtcgagtccccgtgcccgccccggggcctccattcacgccctcagcagaccaagccgaattcagcaactgctccagaccagcaacgggactccaccgaagcgcttcagcgaagaaacggctcatgaacaggaattcatacaagcacaagagggcccccgaaacccgccgtagcatctcaacaagtgtcggctacgaccgcctcctacgaaaagtctccggctcccccgctcgccgtcgacacactgatgccccacccccaaccccaggcttcctggccgaattccagcctcgcacagagcccatcatcacccgccctggatccggagagccaatcacgtatctggatgtactgcacgcaagcagtgagcatcaacctctctcaaccggcggctgcgcaagcctctctgtacctcgcaaacaaggacgctcgaaatctatcggcgacctctgcttgggctctaatatgccttttgtccccgggacagtctactgtatgcaagctcactcggctccttcgagtgattcctcgcatgaagacagcgacgatgatatcattcagcttcctaacccgtgtcccccgccgcgtgtgcagattgaatgtgtcgacgagaataacgtccgctatgtcattgatactgcttcgccggatgaggcacacaaacttatgtactggcctcaccaggttcgccgcaatggtaccaccagtccttacgggaatagtctgtcaccgttgtctcgcgctcgcatgcagcttcgtggttcgcgctcggttgagacttaccaggatggaatcaacgttctttttgcaacccaggcgggatgtttctattttgccgcatgataacgatgctcccacgactttctccctctctctcgccttcttgcttcctccaaaaaagccgttcaatccgttccaatcttggccatgtcgaattaaccttcgatatgccggccaatccttgtcataatcatacaccttgtacccatatatcctgtcatatattaaccctagtctatctctcatccttttttttttctcttgtcttataccggacctccaattatttccttatcttgtcttattgccgtgcttgcatgatttggccggagttgcttattattattacaggtgtatattaaagctccatagcgtttgccatatatatcaatatcctattgttcgccttgcaatatttttctctctcttcatagacgaaatgggtattgtttgccaatttctttgccccctgtgctatggtactttgatcaactcatactatcgtatcccactacattgttcttttccgtatcagcttctgtttctcgttcgatagaggctcggcttaggatttcggatccccagcgtgcatatcttgtgctatttgtgcgctatttattgatagcttgacactggtctacgggattgccgataaacgaaaggaaataaaatcacagaaaagcaataataatgacatgtctcattttcataatatcattgccactacctgccatttccccttaaaactccacattgacaaatcaacatattgaagggacgccttggaacccacagaagaaaatgccatattgtctgatacttcgacttgtttcactatgaaccggagagtgtcgcaaaatacaatcccctcggtactcgatggtggcggccactggtgctttggactgcatggtagttctggcggcagcagatgcaagtcctgatatggatgcaacgcaatagcttaatatgagcctatatcgagatagttagcgttttgttaagaatcattgaggggtaagaaactagggggtagaaacttacggccaaacatgcaccacttctcagcgaagcgctggcacttggggttgcagcagggagtaacaccctgctcaataccctcgggctgctcgaaaggaatgcacagagacttggcgcccatactgggagccttagcatcctcagcctcgccggagtcttcctcggccttgcgagcactcatttccttgatctggtcctcgcactcctcggtcaagcaatggggaatgacgcagaggttcttgttgttcagagcgggaacaaagtcatcccacttggtgatctggatgcggtgagccttgaactgctcgtcggcgcggttgtacaggtcggtttgaatggtctcaagaagcgcagacacgccagtagccagctcggggatcgggatactgcccttgccatccttgccggggatatcacggcgggcggtggtgacaaagtggccagcggactcgccagggccgaactcaatacgcagaggcacaccgcggagctcgtactggttgaacttccagccgggggagtagctgctcttgtcgctgtcagcacggatgccggcggcaacgaggacggcgacgagaccgtcgacctcgacattgagcttctcgcgctcctcttcagtggtcttggctgtaagaccgactggaacaatgataacctggacctcagccacacgaggaggcaggaccagacccttgttgtcactgtgaatcatgaccatgacacccagtgagcgagtcgacagaccccaggagttctgccagacgtgcagagggggcttcttctcatccaccgtggaggtgggatcctcgacggtgatgccgaacatcttactaaagttctggcctaatccgtgggatgtaccaccctgaataccacgcccagtggcggggatgtagccttcgacagtggtggtgtagttaccgccggcgaacttctccttctcggtcttctggcccttaacgacaggcacagcaaggagctccttgtaaatcttggcatagtagtcaaggatgctcaggacttcctcgcgggcagcaccttcagtcaggtgagcagtgtgacctctgcacattgttagtatgtcattttcaactaagaagaatgtcaaaaacatactcttgccaaaggaattctcttgaacggaggagtggttgagggtgcttgaattcccatctcactgtggatattagtaacacttcgagggtatggagaaagaacggagaccgcaccgactgagttccactggttgagacgaagggggagatcacggtgactgcggatccacttggcgtagtaggggtacatgacagtctccgaggtaggacgaatggcaatcttcttctccaggggggtcgagccactagaagtatgtcagtgtagtccaattgaattataaaggtattatagggaagggacggcatacgcgtgcgtgacccaggcgacttcagcggcaaagccttcgatgtggtccttctcccgctggaggacatcctcagacacgaatagagggaaagagcagttcttgacacccatgcccttgatggctttgttgaagtattcctgaatctcctcccagatgaagaacaacgcaggcttgagaatgaagcaaccggagacatcatagtagtccagcaaatcacccttggtgagaacctgctggtaccagccggagaagtcctcctccttcaagacatcaataccgatcaaagcggcaccatcaaccttcttcttagaagctttcttagcctcttgcttgccaatacccttctctcccttatttgaggccttcttgtcagccttatcggccttcagtttcgcgagcttcgcggcttttttagcggcgttctttgactcacccgccttgtcatcggcgggggtttcagtgcggtcaggcaaggtctggggggcagcgccctcgggggtgcggtcttcgctggggttctggctagccatgttgaagaagcgagtgtctgactagacaatgaaggagagacccagtaggattgtaagcaagcgaaatcggggtatgactcccctccttgaagtgggatgcgatatcgaaaattaccagcacaccgcttcggcagaacttttagtgcccacagcacccccccagaagccagacagctctgccatcgcactcgaatagctcatatcacatcgtctgttttaaatatggcaggcatttttgaggcgccgcggaatgcggacacgctctgtgagttttcatctgaaccatcatcgttttcgttgcaataaactgaccattctcgcacagtcttgggtgggcagaaaatcaccggtgctgatgtccgtgagcagaatggtatgttgaattattgatggatttcccgttcttggggatggataactgattccttgcagttctggcaacacaagccatcgctaatgtcatcaaatcctccttcggtccgtccggtttggacaagatgatggtggatgacataggggtatggaaacgataaaccccgcagagcttggctgcaacttctaacatctgacaggatgtgactgtgacgaacgatggcgctactattctgtctcttcttgatattgagcaccctgcgggcaagatcctcgttgagctggcccaacaacaggacaaggaggtacgggcctctacaacacattttcaaacgcacacgctgataatgatttcaaattcaataggtcggagatggcaccacctcggttgttctgatcgccgctgagcttctccggagaggcaacgagttgatgaagaaccgtatacaccctactacgatcatcaacggataccgaattgccctgcgcgaggccgtcaagtatatgaatgaaaatattacgactaaggtggataatatcgggagggagagcttggtcaacattgcgaagacttccatgtccagcaagatcatcggttccgattccgatttctttgcgaacatgtgtgtggacgcaatgctgcaggtgaagtctttgaaccagagaggcgaagtcaaatacccagtcaaggccgtgaacctgcttaaggcccacggaaaaagtggcactgagtccgtactcgtggacggttacgcgttgaattgcactgttgcttcccaggccatgaccacacacgtggccgacgccaagatcgccattctcgatatgaatctgcaaaaggagcggatgaagcttggtgttcagattacagtggaagaccccgatcaactggagaagatccgtcagcgagagtccggcattgtgatggagcgtgttgatatgattctgaagtctggtgccaatgtcgtcctcacgactaagggcatcgacgacatggttctcaagctcttcattgaaaggggggccatggcagtccgccgctgcaagaaggaagacctgcgccgcattgctagggccaccggtgctaccatgatcagcaccctctctgacctcaacggagatgagaagttcgacgcatcacaccttggacacgcagagtcagtttcgcaagaacgtatctcggacgacgagtgtatcctgatcaggggtaccaagatccacactgcggcttccattattctccgtggtgccaacgagtacagcttggacgagatggagcgctctgttcacgactctctgtgtgcgatcaagcgcactctggaaagcgggagcattgttcccggcggtggagccgtggaaaccgcacttcacatctaccttgaggaattcgcagtcacagtggtaagtaatactgttcgctattctttgctcccatatcggtttctaacattttcactaaagggctcccgtgagcaactggccattggcgagttcgcacaatctctccttgtcattcctcagactctggcagtcaacgcagcgaaggattcatctgagcttgttgcccagctccgtgtccgccacgccctgtcacagcgtgtgcaggatggcgatgctaacgaggaggagaaggccattgctaagaagaagacctaccgcaactacggtttggatctgacgaagggacgggttcacgacactttgaaggccggtgtgctggagcccagcatgagcaagatcaagcaactcaagagtgctgtggaggcttgcatatccatcatgcgtattgacacgatcatcaagctggaccccgagcagcagcaggatgacggccacggccactaagcctaagcttactttgactaccccaatccccaaaaaaatggcagtaatatgatgtgacatagatgatcagcagtagtaaattctcatttccgctgcactgcatatgaacgaatttctcttgaagtagatacatgaaactcgtagccctaaacaaccattctactagatctatatccctcactgccgcctggcagccatcaacttccggtattcctcaacgatattcctccgctcaccagccaattcctcacggcgtctcaaactcccaaccgcagcaggcacattggcaacatcaaccttagccccgccacgcactttgaagatctcccggggtttgaccaattgaggcggcgctttcgcaacctcaaatggattcctcttccgctcctcgtcgcgcttcttcagcttagcccaaggatcaggatcatcatccccactatcagcgtccccattagcattcgtccccttcttcttgcttttcttcgcagccttcttcttccccccagcagcctcaatctcccactctttccactgccgcaactcaacctccatctcttcctccctctcttccctctcctcctgctccttgtcgcgaatcttagcgtcctgctcacgccaccccttctgcaatcgcagcaggtgcttctcatgcttcgtccgcttgtgctgctccttgttcttggcatcacccgtcttgaccgacttggtcatctgcgacaatggcatttcgcggtcaacacgtgccacaaactcggccagccgctcgccaggcatgattttgggcgtttcggtcttctccttggcggcggttttgggtttttgtgtctccgctgccttcgcgggcttcttcgatgacgctgttgagtcttctgtagcattgcgcttgcgcttgttcgggcgctcgcccgtctctagtcccgatggcgctcgtcgacctgtctgctggtattgcattaggcggcggaatgctttcggggtgtcgtcttcggtgacagtcttgaggcggtgggtgggtgctttgttggcgctctggttctggtctttgccttggttcttgttgacgagttttttgccattcttgcctagcttaggcttgactagatcgcggactggaagggctttcgcgatctctgagggtgggagattgaagtggctgccgcgagtggaattgtcagttttgggctttggataaacttagtaattactagtgctcacgctatatcggcttcgccacgtctcttgtgtttgtgaggcattttgggtggttttgcaatggaagtttggaggattggagttgttggcggaactttttttcatcgaggttagccttatcttacttatcgctctatgggcggtccacggatctccccagcattcgccattccaaatatcagtctattggcatactcgagaaagcagtaattgaacttgatgaatgagggatatgtttgttcagataatgcaaataagtccgagataaagggtatgcttcgctaataatatgcccccaaacgccagtaaaatgcccacaggcaaaaaaaaaagaacacctaggaaaatgcaaaacaagaaaaatcacagaagaaaccggggaatcattcatcttcatcgtcaattgagtctttcatatcagcccagccacacatgtggcgtttaccctcagtttcaccaccgtttcgaagctcgcgagcctcaggtccctcacgccagcatcgagcatcgtagtcatcactcacggaaatgagttcgccagatggtgtccaggacaaaccagtgacctctttctgatgaccttcgatgaggggagtgcctgattggtaaattgggatggtatcttcgagacggccggacaagccgattccagagttggtgcgacgaagacctgagcgagtggtgaaaagggaagtcctgctaggcagagattcggctggtgttttcacggtagaattgagaaatcgttcatcggtagggaagaggatggggcagtggtcactgctcccagttgccaacatctccggatgatcgtagcttgctttgcgcacagccaacttcacatagaatgaggatatttggaggcgaggatggcggaaaccatagagaggcccaagaccgtccttgtcggagcctccagtccttcgtggacggttgttgttgagcgagagttcaggagcatgcccgagaattaagtgtgatgtcgaatatgtgtaaacagtattatcccggcaaagtgtgtataagcgtgagccatctcctccaaatgccatggaagttagaccaaagcgtcggtacttcacatggctttctggctcttgcgttgtagatagaggaatgacgggtcgaccacggcgattgttatgggctgttcgcaaatcccacagtctgacgcttgcgctagcctcggaagccgtaacaaaaagattttcgcgtccaggcgagagaaaagcgagggaagtaacggtgatgtcggttcggccaattggtggcgcatcatttttgtccgtggtcggtttatgagaggtcgtgtatgcatgagcaccttgaatggtattcagaacatgtgggtataacatctttggctgcgcagtggtcacgacattttcggtctcggatagggagcattggacttgcaatgcaggccgttcaaaccccttgcagcggagatcccagatattcacatttccatcccgactgcaagtagcaagaaccttattgttggatgctggttggaattggacacgcttaacggaggatgagtgattcgataagcagtggataggtcgttgtgttgtcatatcaataataagagatgtttggtctccagatgctgtagccagtagcatgtcgtccgatgagaactcgagatccataatcgaattcatgtgcggacggaacccaaggtatgcatcagcgaatccaggatcctcgtcaatcgatgaatccaagagccgaattccaccctcttcatcgcccactgcaacaagagaatttgcttcccatttgttagcatgtgtaggatcagtcaggtaaaatatgactcactattgcatgaagcattacaaaatgggagggccactgaacgctccgatccatagctagaacacatgtgacggtcccgcggtttcgaatagaagttggaagttagatcttgccagcctagagaaaatattagaggtgtataagaaagccatggggtaaataccaaccagcgccagagttagatcgtagagttactttatttgctcgagcccccatcacatttcgcataaataaagcaccggatgattgcaatgcctgggagcggcgcacaggggccacggggggatttcgtttgggtggactcggcggtgctgatgcatcaaggcggatgttgatgtttgaaattttaatatcttgttccacatcctgcgtcggagaccggacacgaactctcttcagaggcgaggattgcggcgagacgactgaagagaatgagttctttcttttcctgcttggggtgcgaatgaagtcctccggtaagtcatcgtgggggcttctggtgctgccagccttagaggttcttgaaaaggccggtcctagacgattcaccgcgggcgatgatagtgcccgtaatgcctggcggctagttgagggcgtgatagaagtatccccgactggtaataaagagcgcggggtaaagaatcgacggaatgaccggggcgttacagtcggtggctttctaggtctgcgagtatcggaagcaatagacggcggggatgagggtggctctggaggaaggacaggctctgaccggggtacttccgggagattgaaggtgtccattgtgtgttgaacaaaaagcaaagagaaaatcaaaggctatgcaagcattggtggtattggtggtggctggaaggctaaagagggtcagagattaatcggggaagttggatcttttcccgtgtcgcgacgtgacgcgatcgtgttaaggcatctaaggcatttcaaccccctccatccttaatgccgaactccttcactctcaattatttccccttgatgtttgaataaggcaagtcagtttgaattagttcctaggttaaagtattttcccagttttggtatcaaaacgcgtgaaatcacacgatattgatcaatttcccaatatcagactactataatgatggaacgttggaacatcaaataggtcccttgattaacttttaaagaatgctcaaacagagggagatgcaaacagagggagatggacctaactcaggttatgttgtatgctcgaagtataggtcctgtcacgtcatgtgacctacaaggctgtataaacatatattgtccaaacatagaaactaccctttcctcaacctttcccttgaaacctaagcaacatttgctccattctaacgacatatgcaccttgcctctcaatcatacttttcaatttccacaaaatgccaactacaacagctctttctccttttacgtccgacctagagttaaagtcgtactgtgaagaccaagacttcctatgcaacggagagcccgagcctaacagtcgctcgcagactttgatctatcattttgaaaacaaaaagtggtggatcaaagtaactttcaaaggcgcgatttcttctttcccccaaaacaaaacaaaacgcgaacgacgaaaggaataccaagactttgtcaaattgttcgactttgatcccttggcccttctggatgatactgtgtctgaggtaatattgagcgaagacccgggaacaattgattctatcaatctgcgtcacgacctagaagataccagcaatcgggttataaggcttgttggaaacctatgattctatatccgggaggacccattgagagtgacttatccactatgcctccgatttccctctttccgcgctatcaatatcgcagaattgatagaagaggatgaaatcaccgacggagtattccgcgttttacataggagcgatagaactcctcacatcctcaaagtagtcaatcgccctctttatcaaccacgcgactcggatgtcatacaaaaggaactagagaatcttgaacatttcaaaggcgtgatagggattgtgcagtcagctggtattgcggcgtttaacaacccgtatgcgacctcccaaaatgtcgaacaaatggttatcggtggtattctattagaatactatagtggcggttccttacaacgtgttttaagtgaacagcgtataaggaaatttggttgggagcgatgggctatctaaattgtaaatactttaagcattattcaccgtgcaaagcaaacgcacatggatctcaaaccttcaaatatcggtctcgacgacgatggtaatgcggttatcattgatattagcggtatcggtggaataacgtacaactgacttgccccagagatacgcggtgaactgacacgtcttctgttcgaaactcgtcgattgaatgatatttgagcctacaggaagattttgaccgaaattgcgttaaacgcagggaacagtccgtttgcaagaactctgaagtgggttgcggatcatttaaccaaagatgttgacgcccggtggactctgtctgatggattgtctcatttgaaaattgctcaatgtattgattagttgatggaagtgagctgaagcctcccctctttcggttgctctgtagtaatgactacataaattgtctctagatacggggtactctgtttaaggatgtgagctaacagaatgaccaataaagaagagggaccggagcacctctccctctttatgttggcagtcagtgaattgctggattaaggattcgggtggccaaggcaggggctgcgtgatatacgatgtaaacaagttgatattagtgcgaacacatgttcatgtactgcaggttgccttctaaagggcaaagtcgatgactgcatgtggtagtcagatatatacaatagacctattggttcgatgtctctatgtgagactactaggtatacgatcttcatccccttctcttactgttatagactgttcaaaggatgtaattgggaatactacctcgtggccagggtggcggacacaatatttctatgtataattatcactcacaaacacagaaacctaccataattttacactagtgccatatggtaagccacattgtacataaaaaaggcaatcaatatacacggtctttcagctcttcagttcctcagctcactcttttgagaattgtaacatccaaggtctgatttcgcacatcaaagcaaatactgacttatgaaaagggaccgatatatcccaagtcatcttagtctgactaatgtcctgtagatactttccattatgacgagacagagaaatgctttccgatggatagttagcatcacttgtgaggatgcacttactccccactccatagttactcctgaggagcacagaggccctggatgtatatttaaatatgattccatgatatcgtaggccaatttcaaacatagctaggtagcttcaagatagtttggttcagtccatacagatctcggcgggattcaaggttgtttgtccttggaattcaggcacattgatttgctgactcatgaccccaggtcctgacaccgccctgaaggttctgccgcatccgcggaatttttttaatcttttttttcgaggaattagaccgcaatctgcaactgcacgattcggttttgccagtttaagaatggcaccaatcaagcgcaaggggaatgcccccgaagaaaatactgcccgccagccccaaaaacgtgctaaagttggagcggaggaggtcaagagagaccataagaagtcaaacgatgctaccacatccaccgctgggaaagcttcagaactttctgtgctgcgcgatgacgagccctcattccctcgtggtggcgcaagtgttctgacaccattggaacgcaagcaaattcagattcaggccaacagagatgtcttgttcgagcagaaagaatctggaaacaagaaaactgcccagaagacaccttccaacgaattcgccgaagaaagcgacaacgatgttgaaatggaggacgaagaaacaactacgactacgaagaagtcgcgaaagaagaagtcaaaaagcaagaagtccgcagacaaggaagctgatgacaagcaaaatgttcgcatcgagggtcttagcttcaaggtacgtgctagaaaactctttcatgtcgcatcactctaacaattatagcgcattgtacccggagccatgatcctgggccaggtctcgagtatcaacgcacacgacatcggtctttcgctccccaacaaccttaccggttacgtccctctcacatccgtttcgaagggcctcgaagacagacttgagaagatgttgaacgatgaagctggtaatgacgatgccgaggacagctccgacgaggagtcctttgacttgaaggatcatttctatttgggtcaatacctgcgagcattcgttgtgtctactggcagcaacccggatgatccaaaggcaaagggcaaaaggcgaatcgagctttcagttgaccctagacaaacaaacaacggcttctcaaagtctgatcttgttgtgaactcagctgtccaagcgtccgttgtcagtgtggaagatcacggtgtggtcatggatctgggcatcgaaggctcagaactgaagggctttatgtcctccaaggagaccgatcccagtgtggattattctagcatcaaggaaggctctgttttcctttgcatggtcactggtcagaatcccagtggcaatgtcatcaagctgtcctccaacttccaaacgtctgcctcgatcaagaagtccaactacctcaattcggcacctacaatcaacactttcctccccggtaccgctgcggaaattcttcttacggaagtcacatcgaacggaatgattggaaagattatgggaatgctcgacgcaaccgttgatttggtccagtctagcatcaacggcaagattgatctggagaagaaattcaagattggtgcaaagatcaagggccgtattattgcgactttcccggctgccgagccgctcaaagtcagcttttctatgctcgaccacgtcctcaagctctcttccgatgctcgcggtcccggttcttctgatgatgcgcctgctatttccgcaatcattcctgaggtcaagatcgtaaaggttgatcaaggtctgggtgtgtatgctcggattggagaaacaaaacatatgggcttcgttcacatgtcgagactctctgatggcaaggttgaaacagtcgacgaaagttctggacctttccagctagacgctgttcacgaggcaagagtcattgggtacaactctattgataacctctacattctctcatttgagaagagcgttatcgaacagcccttccttcgcgtcgaagatgtgaacgtgggtgctattgttaaaggaaaggtcgagaagcttctgatcggtgccgatggtatgactggattgattgttaacctggctgacggaatcaccggtcttgttccttccatgcactttgcggataccatgcttcagttcccagagaagaagttccgcgaggggcagaagctttccctgaggatcctctctgtgaacctcgaaaaacgtcaaattcggttgaccctaaagaagagcttgctcaacagcgagtctgctatctggaaagactacaaagatatcactccttcggctcagtcccctggtaccattgtcaatcttcagagtcatggtgctgttgtgcagttctacggcgaggtccgtggtttccttcccgtatctgagatgagtgaagcatacatccaggatccggcccagcatttcaaactcggccaggttgtcaatgttcatgctttgagcgtggatgcagcccttggaagacttgctgtctcgtgcaaggatccctcgacattcaccgaaaagtatcgtgaggcctttgagaaccttcatcccggccaccttgttactggaatcgtctttgagaagtccaatgatgatgtgcttctcaagcttgacgagtccggcctcgttgctcgtctcgacgcttcacaactcatcgacggtcccccatcgaagcaaagctcgatgttatccaagctccgcgtcggacagaagctgaatgatcttttggtcctcagcatccaacgcgctcaccgtcttatcaaggtttctagcagggccagcttgaaaaaagctgccaagcagaagaacatcccgggccatttcgaggaagtccaagagggctcccttgtcacaggattcgtccgcaacatcacacccgacggtgtcttcgttgaattcctcggcggcctcactggcttgctccccaagcgtcttatcgaagactccaacctcgaacaacctcactacgggttggcaaaggcgcaaacgattgttgtcaatgtgcagtctgtggaccaggaattcaagcgctttatcctgagtatgaagcccgttgaggctacccaggccgctcccaagaaagcggtcaagcagactgacgagagcgttgccaaccccgtcgatgccaacatcaaaagcatgtccgatttcacatttggcagaatcgttgagtgcaaggtcgtctctatcaaggcaacccaagtcaatgttcagcttgcggataacattcacggccgcattgatgtgtccgagatattcgacgactggaaagacatcaaggatcgcaagcagcccctgcgattctttaaggccaagcagactctctctgccagaatccttggtgttcacgatgctcgtaatcataaattcctccccattagccaccgcactggaaagtaccctgtgttcgagctctctctcaagccaagctacatcaaggccgccaaccctgcccctcttaacatggagcaggttcaagtcggctcctcttggataggcttcgtcaacaatgtcgctgatgattgcctctggatcaacctgtcccccaatgtccgcggcagactgcgcttcatggatgcatcagacgacctctccttgttgactgatatggagaaaaacttccccatcggctctgctttgaaggtccaggttaccgctgttgacgctgagaagggccaccttagtctatctgccaagcaaggatacgacaagctcacatttggagatatctccgttggcatgatcttgcccggtcgcgttaccaaggtcactgagcgccaactcattatgcagcttggcgagtcacttgtcggtgcggtcaatctgattgacctcgcagatgactactccaaggccaaccctaccgtgcacaacaagaacgaggttctccgagcatgcgttatcgccgttgacaagtctaacaagaaaattaccttgtcgctgcgcccctccaaggtcatgagctcctctctgcccgtgcaagaccgtgagatctcttcgctcaaggatgttaagcctaacgatgtcattcgcggcttcgtccgacgagtcaccgattctggtctcttcgtggcagtcagtcacgatatcactgctttcgtccgtgtctctgatctttccgattcgtatctcaaggaatggaaggactccttccagccagatcaactcgtcaagggtaaggtcacgtttgttgacgccgagcaaggcaagctgcagttgagcttgaaggagtctgttctggaccccaactttaaggctcttatcacccttaaggatcttaaagttggtcagattgtcacgggcaaggtccgcaaggtggaggagttcggtgctttcattgtcgttgacgggtcttcaaacatcagcggtctttgtcaccgtagtgagatggccgagaagcgcgttgaagatgctcgcaaattgtacgacgaaggcgatgctgttaaggcgaagatcattaatatcgaccttgagtcgaagaagatctctttctcactgaaggcttcccacttccaagatgaagaggaagatgacagcgaggatgaggacagtatgagcattgacggtcttggcggtgtcgaacttacgaaggacgacagcgaagatgaggatgatgatgagtccatgggaggtgttgatgtagaggatgacagcgaggaggaggaatcagaggaggaggatggagatgtcccgatacagaagcctagcaaggccggaggtctcggtgcgagcggcttcgactggagcggcaccgccaagtccgatgctgccgcgcgctccgacagcgaagacgagggttccaaaaagaagaagaagaagaaccgcaaggccgagatccaggtggaccgcaccggcgatttggacgccaatggccctcagtctgttgccgacttcgagcgactcctcctgggtgagcccgactcctcgcttctgtggctgcagtacatggccttccagctggagctgggtgagatcgagaaggcacgcgccattgctgagcgtgctttgcgcactatcaccatgggccaggatgctgagaagctgaacatctgggttgcgctgctgaacatggagaacacatacggtgatgatgacagtctcgaggaggtcttcaagcgtgcctgccagtacaacgagccccaagagatctacgagcggatgatcagtatttacatccaatccggcaagaaccaggtatgtatccattttgaatcttacttcctacggatgttaacaattttacagaaagcaagtgatctcttctacgcggctctcaagaagaagatttcctcccagtcccccaagttcttctacaactacgccagcttcctcttcgacaccatggcctcccccgaccgtgctcgggctttgctcccacgcgcccttcagtccctccctgcccacacccacgttgagacgacctccaagttcgcccagctcgagttccgctcccccaatggagacattgagcgcggtcgtaccgtcttcgagggtctcctgtcctcattccccaagcgtattgatttgtggaacgtcctcctggacctggagatcaaggtcggcgatgcggagcaagtgcgccgtctcttcgagcgcgtccttggcctacagagtggcaagaagggccctgtcagtgtggacgctagcaagaagctcaagcctaagcaggcccgattcctgttcaagaaatggctttccttcgaggagggtctggcagctgccaatggagatgagaagatggttgaagaggttaaggcacgggctgttacctatgtcaagtctcttcaggagtaactctataaaaaagtgtgttcatctgaacctgccggtgtttggggcctgtgaatttcaatcttcaatgtttttacctgtatatagatagcgatggaaatattcaatcaatcgtcaacaatccagcacgtgtatacctcaggacatggtcgtagctttgaaagtaccacggatccaatcaccgccctcaatatcatggctgcctccagttttaagggtcggggaatctatttttgtgttttcccttctgtcttctctttacttcctcacccatgatgagccctttccgccctccccagaccaactcggtatccagtcttcatttcgatccatacagagactcactagatacggaatacccgaaggtcaatgtacatgttgactctgttgactctgagcgagtggggtatccggcccgctcatggcggcaagtctggacagccttggcttggccttcaacgtcttccatgctgtcggaaaacccagctaagcgcaagcgatcttgtcgatcgcgatacttacatggtctccggcgtgcgattatcggaatattcattatgctgtgagtttcacgaactgtgcaggccgtgtctatgcggaagaccccgctgacctatcgccgataacagaggcatcatccaatttatctccatcgcttgtggtatcgccctctcattcttcccagatgagtacgaccgtgcagttcataattggctacccagtaccgacggcacgaacacaatagacagcacgcgctggcccaccgatatttcgcgcgatatcgtccctgttggctgtcactcccacaacgattactggcgccgggtgccactgtactccgcactgcaggcgggatgcataggcgtcgaagccgatgtctggctcttcgacgatgagctctacgtcggccacaccacatcgtccctgacagagcgcctaaccctacaatctatgtacattgacccgctagtatctatcctcgagcgccagaacccaaccactagattccaccggggaggccacagccatacacatggtgtcttcgggacagaccctgcccaatcgctcatccttctaatcgacttcaaaaccgcaggcgcggcaacctggcacgctgtcatgaagcagctcgctccgctccgtgaccgcggctacctaacccacttcaacggcgacgagctcatccaaggccccatcaccgtcgtcggaacggggaatacacccttcaacctcgtcaccgaaaacaccacctatcgcgatatcttcttcgacgccccgctcgataaactcgtcggcacggaccagccagacagcagcatcccagacgcagccctcttcccgcgcacagatcttggcacagatcttggccaaggccaatctggtatgccggctgtaatcaccgcatccaccttcaacacttcgaacagcttctatgcctctgtgtctttcaaaaaggcaatcggctacccatggcccttccacttcacgcagcgccagatggacctcatccgcagccaagtgcgcattgcacaccaacatggcctgaaagtgcgctactgggcgttgccgagctggcctcgcagtctgcggaatcatatctggcgcgtgcttgcgcaggagggtgtagatattctgaatgttgatgatttggttgatgccacgaagggggtttggaatacgagggtcttcgactggtggccgtgatggctatgcattgctatatattgggtatctttcttcttgttttcttttcgcttttacttatgatgaaatatgggatttgatgaaatatgggatcatgggctggattgcctggcgttaagggtttcttatctgatttacgataccttaccttttctttggctgtgttgctttattttgtttgatagaccacttgcttcatatctatacatccaatatcgaaatgtatacgcagctttcgggatactgtactgatactgatgctgtaactaatctggcaagagacggaaaagacaacagtgccctggtgaaaacaacgcttcggttcaaattcgtcacaatcataatttcggtctctgttgcacccagtgcaggagcagtaatgctatactccgatctggaatgtgttccccaatgcccttgattgtcgatctccacttgacgccataatttatgcagtaaaatcaggtgaaaatggcatacattcaccaaagaccatgtagtggctctcgaccagcgacagcccccctaacaccgataaaccacaccaaacgtagctatccgcgggatgtcatatctcataaacagcagagcgcctcttcaccgaactcgcggataacactaccctcttcccgaatcaggccaccaagccagtgcttcgcagtctcaaaatccttggcaccgaacttgacaagcacaaagcccgcgcgcacccgcgccgccgtccatgtgacattgcccttaaagctcagcgaaggctcaggcaccgacgacggtgcatggtccgaccaattgcgactgccaatgcgcggctgcgactggaattgtttcaacatgaacgaaccgagcgcttcgaatacaggaccggagagtataagcgtgccgacgacgccgtgtgggcgcgtgcgctccgcgatgatattcagcggggttaagccgactggcgcctgcggtggcagatcgacggggttttctagaccggcatgagtggtgttgctgtaggttttatctttcttttcgacttcgagtccgtcgggtatggatgtgtcttgtaggtcctcggattcatcgtcgagaattaccgagtcgcggaggagtagtcggcgtttgcccttgtcgtcttcggcccagacttcgttgcgtccgcgccagaagtggaagtcccagtcctcgccgcgcgaggtccggccttgcgttacccaatctaggacgcagaggctgctacgctcggcgccttttgcggtggcgtctacggtgaaggtttggacttgagcgtagcggctgtgtttaaaggggacggaagggtctgggaggtagcagagggctgcttggcggccaatgttgacgtcgagtgtttgctggctcatgtcggagagagatttgtttgcgggcatttgatcgcggtggcctttgattacatttggggatgtgccgttgttatttggggttgttttgaagatcttggtgctgccttgtggcgttgttaccaccattcgtgtcctgggttcgagcgtaatggacacttcgatgtggtcacctggcaggagcccgccgccataggtgaggaggtataggtggacggggttggagggacatgtgtctgagagggcagaagaatctggggatgggacgaagccgccggtgcgcgggactagcttcaatggatatttgtaggtgagggttgtgagggtgggattgttcggtgggaggagggagaggacgaccttgccctgccctggcttcgcaatggaagactgaaagggcgagggaatgggcattgctggttttcgcatggtgatggatgtgataggttgagaaggcggagagacaagaagtgtagctagtaggtttataggcagaaatagaaaaagctatattgagcaatgaagccaggccatgctatcacagatcagaggggacgagttggtataaaaacaaaaccctggggaaatgacgattccttagtcataggcatccacttgtcaagcgggggatattcccaaatgacctctccttggctccctgatgaggatgccggagcaaaactaggacataaaataactggcagagaatgaatggttgaggtttctatgacaaagagtatctccctagacctggagggttacctcttggcaatgtacttttatgtcaattgcccaggtgatctgcacgacttgtttaactattatagcctggcagtctgggcattgaaaagaggtcatgagatacagtgtagctatggtaaatcagccatatgctttctattatattagggggtcaattttgtgatgcaattgtcgatgagaattgctatacacacacccctaaaactagctacacactcacttaaactacttcggctagggcctatcccagggagggctcatggctattctcatttctggacggaaccgaatgttcctggctagagactaagatcgagtttgaacaaggcgttgacagcgctaaaccccgcagctagggagaagaacgtttagttgactagtgaactatacagaatagacacctgatatacaagacatcaaacccctacgtagttacgtaatctaggcaccctcaggccccaaggcacgatgtcgcgtctccccccacgctgagatccggaccgttttctgcccaagtacttccgtttgattgaccttgtctcaacacggtcagagcgcgtgtcgcaaatacttgacgtctcgaattgcagacttctttcatatcttgcgccaacttctgtttgctgtaccagacctgcgcgttgcacgagcgcgcgtcccgacctgatctgtagcgacatctgccaactctgttcaaagccattgatctgctcagcagacccatctatccgatcgcatacccgtataatacactcatccgatatcatggatatcgataacccacctctatcaagccccggtggcccgtcatcgacccccgccgaagaccgacgcaaatccggtcggcagacgcgacggcccgaagtattttcgcagactacacactctgccgacgaacaagctgccggtgggaagcgcaaacggggcgaggcgcgcgaggacggcgatgaggacgcgtctgagtccgacagtgatgatattgacgacgagaccgatgaggaagaactgaaagagaagcgacgcgctgcacgccgagctagcgcgaagaaatccaaatccaaacccaagaccaagggatcgcacgcttcaaagaaacccaaggttgcaagtaacgggttagggagacagctcgccttccgaccagccaccaatggccgactgcctgctgctcgttctcggaaaccgaaagtacgaccgagtctcgcggcgggtgaacgcggattgttcggtgagtcataattatttgtgtatgcaatatcaatggctaataccagagttagccgaggtatttgggaaaggtagcaatgccgatacagtggccgctcagtggttatctcaataccagcgcgacaatgggcaggccatgcgggacctcgtcaacttcatcctacgatgcacgggtaccgatcttgagatcgacaataatgaggtggaagacattgataatgccccgggccgaatcgaagacttgcagaacctttaccaagcagaaggcatcaccgaataccctatcatctccaaagcgaagaagttcagagcgttctcggttctcctcgaggaattcactatggcactgatccaaaccttccatgcctcttccatcttgtacaccgatgacaccctgctcgagaatattcagatctggatctcttccatgtcaacatcaaaatgccgaccattccggcatacggcgacattaatctccctttcaatcatgaacgcattatgtgatattgcgcgagaggtgacgacaaccgtatctacatccaggaaacaacttgaaagtgagaagaaaaagaagacggtaaacaagggtcgcgtggaagcaattcaaagggctgtttcagagggcgaacagaaggtggagcgcttagacgagttcctacaggatgggttcgatactgtatttgtccatcgctaccgggatattgacggtcagatccgtgccgagtgtctgacagctctaggcggatggattcgcacataccgagaaatcttctttgagggccagtatttacgatacctagggtggaccctcgccgatgtcattgcgcagaccagactcgttgccttaaccgagcttttaagcctttatgagaaccgtgacaaccttgctggtttgcactcattcactgagcggtttcggcaacggattgtggagatggctattcaagatgctgatgtttcggtgcgtgtggctgcgattgagttacttaaccaccttcgcgaagccggcttactcgagccaaatgatattgatgctgtcggtcgactggtgtttgatttggacacccgaattcggaaaacagctggacgcttttttgttgccaacgttcaagatgcatacgagtcaatcaccgatgaagtgggagaggagatcgccgaattgctggctgacgacgacgaagacgactatgagtcgcctaagcactcctggatcaagtttaaatgcctcgccgagctgtttcaggcctacgacgaccaacaagccgaacagcaaccagagccattgtctcgcgacacactgctaggtgcggccgtagagtcgcgctttgctctcgcgactgaggctgtctatccctacctggaagaactgtctcagtggccatcgctggctggttatctgctttatgaccactctcaaatcaccgatgcgccatctgaagatgataccgcaggagccgtaaagaaaatgtacagaatggaagagggacaagaatctattcttctggaagtactctgtgccgcagtcaaactccgtgttctcgacatcgccaagtctgataccgacaagcgtgggcgcaagacgaaggctctagaggccaagatttccgagctccaggaggaactttctcacaaccttgcgcagatcatccctgggcttctcaataagtttggatccacaccggaagctgcttctgtcgttctgcgactagaacaccttgtggacctgaacacaatccaggatctccaaaaagacgctacggcttatacctcgctgctcagcgatatcaacaagcagtttttgactcattcggatcaagatgttctggccgaagctagtgtggctttcttgcatgccaagggctccgaggagatgcgagaggcgctagagagcaaggttcaagagctgtgggatgatatggtagaggcactggctgccttgtctcggaagaaggaggtccaggaaggtggctcaatatctgatcccactctcaccaacctgaccaacactgtctctcgaatttcgaacctcgccggtatcaccgattgtgcctccattctcgaaactgtccctaattcaagatcgcaatccaagaaagaccacaatgaagccccattcaacaccctcattcatcttgccgaacgtggtctgcgcatcgaagatgacgatgaggataccgctaaggcagagaacgaactggtctcaagcagtatccggtcgttgcttttctatttcatgtggaaggtgcaggcactgtccacagccttgaacgatggaaaggcctccttcagcacatcctacttcgaagcactgacaaagagccgcgaaacgttcgctatattgctcgtcaacatcatggaaacgcgccctgggctggatgaccttcgcttcacagcaactacaacatacctagacctacagacgctcttcagcactctccggaacatcggccaagccaacggcaatgacgaagacgtcctgtttcaaacacaaggcctagtccatgaaatcgaacccgacacccaagccctcatcaccaagatccacggaatagctgagcgcacatccgccaagaaatcaaggctcaatatcgagcccgcagacgacgacgccccagcctcggaagacgagctcgactccgaagatgaagccagcgactccgaagacgaagtagtcatcaacgaccgcctccgcagtagcattgtagccgaacagcgcctctgcgagctgacaggcaagctcgtcctcgccatcatcgcccgcatcatcgacgcctccggctctaagcgcggcgccctgaagaagcgtctccttcgtcataagaccgccctcggccataattaccgagaggtcctatcttatttggaagagcgtaagccccgcagtacgccccgcgccaaggggaaaaagcctgccaagtctgctgcttctcctgccaagggcttcaagtctgctgagcatattgatgatgacgatgagcacgaccatcctgagcctgttgaggaagatgaagatgaggacctgcgtgcgcgcggacttgtcgaggatgatgttgaacatgagaatgggcacgaggacgaggaacttactcccacgcctgaggccgatgaggatgaggtgatgggtgactgatctggtctgtcttatttgacgttaatgtgtgcctgaacaaaatgatatttcttcgctgtcgttcattgcttgttacttttttttcttgttacttttttttcgctctctctactttcttctctctctcttttatggattatggctgaattgactgtacctctcttctttgctctcgtttgcgtggatatggagttattttcaacctgtatcttatacacttcccctgatctttactttgctgctactttgctgacttgatctcaatctattcccctctggtctctgctattttttgaaatcttgatatggaattgtggtatagtaaaatggatgtaactaagtctgttgctatcattggtacatttagactctgattgtacattattttcactgcctgagggcttcgtattctaacattgaaggcttgcaagtctagcatcagttcgtctcctcccgagaacataaaatacgaagataagttgtctggggaagataggaatatcctgggatacaattacgactacaggaagaaaaggtaggtcaagtgaaatctggcattttttcctggcgaattgcaaagcgtaccacgagaatagtgcaataacattttcagaggcatgattcgagcagattatgagcgtggtacgagcaagatgtgctgccacagccctgttgtcagcaagcgaggacgtgcccgcgcaggagaccaatgccccgtcaaggaacaccatagtcagaggacattaacgtaactggagagagaaaaccgatcctgcaaacaaatgcgcctgtgtatgaggatgctaaaggggtgggggaggggatacatgatggtgaatcttgtttatcgtgaaatcaaaaaaaaaaaaaaaaagaggggggnnnnnnnnnnnnnnnnnnnnnnnnnnnnnnnnnnnnnnnnnnnnnnnnnnnnnnnnnnnnnnnnnnnnnnnnnnnnnnnnnnnnnnnnnnnnnnnnnnnnnnnnnnnnnnnnnnnnnnnnnnnnnnnnnnnnnnnnnnnnnnnnnnnnnnnnnnnnnnnnnnnnnnnnnnnnnnnnnnnnnnnnnnnnnnnnnnnnnnnnnnnnnnnnnnnnnnnnnnnnnnnnnnnnnnnnnnnnnnnnnnnnnnnnnntgaaatgcgtgacaagagaagatgagggaatcaaatgagcaccataaactgtttagacgcaacgccagaccgagaagtagcttggtcgaagcgcacgagaggcgtcgaggctgtatgcgagcaacctggcctctcggtagccagtggtgcccgacccatgcgaggatacgctggacgcagcttcgacgtttgggtttgaaagaagatgaagatacaaggattggcatagtgcacgaggaaaagacaagtctttacatatccatggtatcaccgccgttgccgaagttgaagccaccaggttgctgctggccagtgccgagagcaaatccagtctgggtctgttggggagcaagttcctcgatatcgccaccggcctcatcctcgtcagagaagtacttctcgataatgttgtaggccttcatgtagatctcctcgttggcgttgttctggcaatcgtgaatcttctccatgccaccggcctcttcgatgaagagagcgtagcggttgacacgagcctcaccgggctggccagcctccttgtccatatctccgaccttgaggatgttctcgagaccgtcgagagcgacctggatgatcttattgtcagggcaggccaggagatcgcacaggggtttgatgcagccttgagaaacaaggtagcggatctgatcgggcttctggagaccaccggaagtagcgttagagatagcccagcaagcctccttgcgggtcttgaagtcaccattggcaagaaggttgataaggggagcaatgatgccagcgtcgatgaccgcctgaatctggctggagttaccggcagtgacgttggagatggtccagcaagcttccttgcggataccatccttggtggagctcaggagggagagcagagcaggaagagagccacagttaatgatcacctgggtctggacgtcatcaccagtgacaatgttacccacggaacggagagcgggagtctggacagaggtagaggcgtgcataaggagctccaccaggcgacgggggataccggcctcgataacggcctgaatcttgtcgttggcaccatcggacaagtaagagatagcccagcaagcgtcaatcaggacctcgtcatccagcatgtagatgagcttggcaaggactggaagggcgggggcaatagtgttccagtcaggctggggagtcttgccacggcagaagttgctaagagtccaagtagcgttgcggagcatgctcagcttgcggccatcgttgatgaggttaagaagcgggcgcagggcaccggcaccgaggacaaagtcacggcagtgagggctgtcaccagcaatgtttccgagggcccaaacggcctgttcacgaacatcgggctcagggctgctaagcaactcgacgaagatggggacggcaccagcttcaatgacgacctgggtctgctgggcggaaccggaagcaatgttggtcaaagcccaggcagactcaaactgaaccagggtgtggggtgagcgaaggaactcgacgaaacgggctacgacaccggtctcaataacacgctcgataggggggttgcgctccttggaaagcaatttgcggaacttggtggtggcctggatctgttcctcaacctgatctgagaaaactcccttcaccatctggggaagctcgacgttgagctgaataaatcattatgttagcttggtaattttcacgatgttttttttttattgcagtggggtcaagtcagaggggtcttcgtgggccatggcaacagggcggtgaaaaaaaatccttgttgatgatcgcatcatgaaaacaaagaattcactcagggcccataaaggtggtgaccacaccatgagcccgtagaaatccaaaggaggatatagaatagaacagatttcaaaggatcaaagaaaaattgaaagacctacctcactctcaatagcactggcctcatcatcactctcagtggcggcagccatgccaccaacaccgattctaccgtcctgagtttggataccacgtctcttggctaagttctcatcacgcttagccttgcgaatctcgacctgctgttcttcacggcggcggcggagctcatcgggcttgaactggttcttggccttgaactgtgtgcggcgatgctcgggaatatagcgttccgccatgatgaaaatggaaacaggaaaaactaagcgcgccgcggtgatcgattatgtagtatgtgaggttgagtgggcgcgcggggagatggacggagagtaggaagaaggaagagggatctgatgtgggggaagaagacttctgtgggaggggaaacgatgctatcacgtgattactcattcgacgtactcccacgacaataagctcgtcctccctgagctcttagaattccacttattttggtgcttatttatgacaattgctctagttatgacggatgtgcattgacagaaacgtgcatttttttctgagctagtttgtgatatctcaccgggagcttgcaggacatcccatcgacaaaagatatggcttcaggtgatctagtggacattaccactgcttgctcttcacaagggactttcaatgtcataggtgtggtaattgacaagctaccactctttcggaccagaggctcgtcggcatgcatcaccttcacgataaaagactccaattttgatgcaccaggctggcaaggtggtcttaaagtcagatatttcaatgatgatgagagttatcttcctaatgtcgagctcaaagatgtaatcctattacgaaacctcctggtgagtttatttacatgagtgcagcagcatggtaagctgacaggattcaggtgcaaatttaccagaacaaaccaacagggtttgtttctcagagatcccatgtgtcatgggctattttccgaccagagccaagctcgagttccagtccgttcattaccagcggtcccattcctttcgagccgagtctgaaggaaaaggatcaggcacactcgctcctggatagtgtatttgccgaagcaatccctgtgcaacaacccaccccgcacagtatacccgcctttcagcagtcttctcatgttcaggcttccgttccagccgcaaaatctggaggcctaccgtatatccctattcagtttgcgacggttcgccaactttgccagttacttggccaagttgtgaacctcaagacttatgacagtgaaaaatgtatgctggacttgactgatttcactgagaatgaggggcttgccaactacaaaaaacccggagaaggtgacgatgaatcaggtcctgagggcgaccgatttaattacatacagaagacaaagaactggtcaggcccatggggtaaatttaccatccgagtgactttatgggagccgcatgccagctatgctcgagaacacctcaagccaggtgacatcgttctattaacctatgtccatatcaaggaacgccgtggtggattggaagctgtcgttcatgaagacaaactattcccggagaagattcatgtcaggaagatgaatggtagcaatgatgagcgtgtacgagaattgatgaaccgccggacagaatactggaagatccacggtgaacccaaggcagataccaaaaaggccaagaaaaagaacaagagagtcgagcagaaaagggaggcccggaaagaagaaggccaactgaccatgccagcagcatcacgaatcaagttgaatcaacatggtgagttgattgtgttcctaagagaagcatattggctgataaatgtttagtcaaaacaaaaaattacacagtgcctactttccctctggagaagatcttattggcggagactcatacaaacaatgctccggggggcattgtctataagcttcccttccaaaacgtcaattatcactctcaggtccgggtagttgactttttccccccaaagatagaagactttacggttcaaacgaccaacgctcccttgttcggcaatcaggaaagtgccacggagtctcaacttggctgggaatggcggttttgccttcttgtggagggggttgagcccaaacctcccaaacaacagccccgaggaatgatgaagctctatgtgtgcgggcaagatggtgattttcttcttgacgattatgcattcaacctccgcgacaatccacggagactggaagcgataaaagagaagcttttcctcttatggggcaatctcgaggaggagaagtcgaaagccatagcttctggtcaacagagttgggggccagtgaagtcgtgcccattcgagtgctgcatcaaggaatatggtgttcactgcacccatgccaaagaccccaatgtgatggatgtcgacggcgaggtgtgcacctatcctgattgttttggatgggagagacgatttgccatgttcggcacgactatccacacatgaattctacaatccccaggtcttgtggaaaaaaaatgtatccctaaataaagcttgtatggattgatcctttgtactaatacaatttaacatttttaatcaatagatggttgcgcctggaacctttttttttcacccgcatagaaaggaagaaaaaaacaacgttgaattctcaatgcctgtatagcaagcctgctcccatgcaccgtccataactcccgaatgatcgaaattctgataatgtcatggatgcttcttttgaaccttttccccgtgaaactcacactgaactcaatagacaatattttaggaccttgtttcaagaaaggttcagatcggctgagatgagcataagattgcgagatggccgctcaaattttcgtaactttgacgatgttcgtgtcgatgccatgcgccacgggctcaaagcggcagctgtcgcctcggaagcaagtctttttaccaggttcgctctgaggacaacgatgaccatagatacactcgacgtcatcacattctagaccaaagcgacaaggtgtcatgcgggcaatggctgacaagatgtgcagatcttggcgtgacaatttgcgatcatggtcatgatagcaattctcttcattaggacattcaccgagcaagaaatgataattgcaaagcttgagcttcttcagtttgttaagatcatcgcgaggaatgctcttgaagtcgagccgatcaacacgctggccatatttattccgttccacggtctttgggggggatgcaccaggcaccttggaccgaacgacctggaaatcagaagactcgggtttatttgtcatcgaggccaatggagcacccaaatttgacacactggtactggtagaggttcgtgacaaagcaggtgtttggaattgctgggtcggcgatggtgtgagcaaagtccgcgaagggattgcgcttttccaaggagcagcccaagacggtgcactcgttgcactcggtacactcggtgcggtcaatgtaattggagcaatctttgtggtgcggaaaacatccgggaactgggtgatgcgatagtcctgctctcggaaataatcaaattccttctcgagtggaagaccctcaaccagcgagactcggcccttataattcgcgccagaaatgagttctgtcaatgaccgagcatattcttcattggagggacagcccaagaagagctggtggcaatggcagttgtataagtaaagcttaaaagcctctggaggaagagaatcagcaatggtatctttatgtcaggttgtaccacatacccttgattttatcgtgcgctttgtttttgccagttccaacgtccacaatttcgaagaacgatgcactctcattgaatccacgaataaactcattgattgtggaggcctctagggcgattccgccccggatgtaagtctccataagtcccttcacattaagatagatcttggtcattatcttcggctcggtgatcgtggaaagaattgttgtaacgtagctctggagagatttccagagctgcttggccgcattgcgtccaccctgttcccctagttgcagaaattcatctttgaatattattccttcgccgtctaaaagcaacacgacgaatggttcacggtcctagaaggaaacaaaatatgtgtcagcctgagcttagacaaggcgtccacagctgtgctcaccatcattttcttgacaactgatatctggtccatcagctccatttcatgcacctgaacctcacgattgaaccgggtttcgcgttcatggtcgagtttctcttgttgaaaggaattctctagggtggtcacacgttgaagaagttcctatcgcgagtcttgttagagtgaataggggaccaatggaggaattggttggtacctcaatgaagtcattcttctgctggtccagagcgcttagctgacgatagcgctctaaataagcttgagtcgccatttttgtagattgatgagtatcgtttgcagatctggaaatggttggaattgcgaaaaggatgaatgcgacaaaagataaggaagaaagtaaaggaagggagagaagcaagtttcaagtctgatcaaagccaacagggaaattccagtgggcaggcgcttgcaggaggtgacaatctacaaagcgcgtaaagtgttagaatcagcggtaatcaccaattatcagtggccacctcactttattaaattaattgatatagagagagaaatttatagtccgtcgtctttgcttcaaataaaaaatcaatctaagaccgcgggtgccatctggctgagtcagcccccggttttgcatacgtggagccaaatattccccttcacctgatcttgactttgacctttcccctgtttatctcttctctttctctttcttttctctcttccggtttcaagatgactcgctttggtttcctctctttggctctactctctctccaggccttcattggcaccggctttgctgctgtatgtgtttcgtcttgatttgcttcgggaaccatgtcgcatgactcaattgactaattgtttggggttgaactttcaggatactgagaatgctgaagcagaggctcccactctggctgtctcagcacacgcctctttccctgcttccgagatcttcggtatcaagcttgtcaacggtcaccctacccaggcgctgatcgccatctccaacgatgagccgaatcctatcacggtgaactttgtcgggggtagccttcgaaacgctgaagaccaggcgcaagttgtccgcaacttgactgctactcgttatgccattgagattcccgctggcgagaaggagacaatcagctacagcttcgccactgagatgcacccccaggatctccagatgacactttctgccatcatttcagacagtgagggccgcttggttcctatcgttgcccacaatggcaccgttagcatcgtggaggcggataccagcatcttcgacccccagatgtaggacacccccctttacccttggtgtgagagcaacgaggctaacaattacaatcagcattttcctttatttcttcctactggcctgtgtctctggcactggttacttcttctataccgtttgggtcgctccctacttcccccagaagcgcaagtccgcaaagaccagcgagaagcgcacacagggtggctcaaagcgcgctgagaccccagtcacggaggagacttccaccggcgctgcagtttcttctaccagcgcctacaatgctgattggattccctctcaccacatcaaccgccccgaggcccgcaaagtcaagggtcgctcgaaggcccgtgcgtgaatatactcacgacagtcatatcacgaatggaggaaggaaacaatccttttcaatgtgtaccattgtcgggggttttgtctagtgtgagggcggcattagccacggtgctggaaatgcaccctgctgcttgtcacaaaggacatgtatatctaccaaatagaagattttggcccagtttagcttccacggacgccaaacaggatcacttttggagagttcaatccattgtataccacgctgtgcctgttttggcagtactggtatctcacagtttcttccattctttaaattccccctccagatgttgcttcaattccgcaaaccgattcccaaaccccctaccacagcgccagcaagcaaagtctcgttttaggtactcctcttccgtcggattccgtcgcacatcatcttccgccagcgggaagtcctcgattggcacgaagaatggtgtcgaaaagctattgtagtgtttccggtgcttcaagcgctcgctatacctatccaccgataatacatggacatgcaagtggttcatagatggaactgcatgcaccccaaccataatctcctgttcccagtcccgaccccgcggtagctcgtcgggcggcggatcggcgctcagtgccgtctgtctcgcctgctcctgcgcagagtccttcccatatttgcgtcgcagctcgctcgctgccagcttgcgaagtgttcgagtttcggccctcacttttgctaggaagtcggcatcctcaaatgcatcaaatgggtgcattcgtgttttggtctggtcgcgggggagaaggaggaggtgcaacgatgactttgggaacatgtcgtggatcgccacaaaatcgtcattgtggtagaccacgacatcgggagcatatttctcaggctttgtgatgtaggtgcctagtccatcgcgaacaccaaatgcagtcctgcccttggccgcattgcgatcagacggggttttagtcgcgtgtttggattgcttgcttttaggagccaggagttcggtaactgtcaaaccgatatgtcagtcaagtatttttcagtggtacgtctctcggtctttacaggcattcctcttttctgacgtcccagtttgcttctttgggtcagctttggtcggattggagtggtccccggacatggttggtgtggaagtttgactcgtggtcacacaatatatgttagctacagcattgcctttgagcaacaaatccaaatctcacatcggtagaccgagtagtaagagtacaagacatgtgttgggagttaagtctcccatggtcgctgcgctcttccgtatgctccccgcaatcccaaagcggtttagtgcgggtcgctcttttgcttgaagctccaaaaattatctttcgcgcaaacactcaccacgcacaaaatgccacctaagaagaaaggcgatggtaaaggtggccacaagccgggtacaaaacaagccaaagctgtggcagagaaagcggccgacgaagtgaagaagcaagtgccggaggagcccaagaaaccatccgtgaaggatgtcattggcggcgcatcatggacagggaagctaccggtcaatatgttggcagagcactgtcaaaagcaaaagtgggaaaaacctgagtacaacatggtaatcaacttcccatggcactcgtcgcctgtttacaaacacatatatcaaaccagatgctgataggttgcgacaattgcagatcaaaactgccgacggctttgtatcatccgtcacaatgaagaaaatagatcccaagaccaaggaattaatcgtgatcccaccgataaagctccctccctcccataagcaacttgctgggcagccgacagccctcgaagcgcgccatttcgctgcagcgtttgctctgttccgagtgtgcaatatgcgcaatattcatatgatgatgcctccaacttataagaaattgtggaaggaggactttggagaaattaaagcagcagaaactcgggaaggcaagggctggatgtacgaggcagatccattcttagccaagcaagagagagagagcgcggccgccgatttggcaaagaagcgagcggatcgtgaaagagcccaggcaaaggagaaggcctcaaatgcggaattaggactaggaaatggggatgccaggagtaaacgtatctggtcacaagcgcccaaggtggatatgggcacacggattcgacgagatatcgaaggccttttgcggcaacatacagtttggaacccatatggcgtgaagatcccggaaaccgaaaagaaaaccatcgcggacgaattcaccggtctagggtttcgtcgcagccatgtggaagaagctacagcggaatgcaaagaccgcgaagaggtcttggagtggcttctcatctatgttcctgatgatgacctcccacgatggtctctgccggaaggatattcggctggagtcagtcttggttctggtgatctcgcccgtgagggcaaagtcaaacggctggcatctgttggctatccagccgacatgtgctctcaaattttggacaggaagcacggcgacgaattggccgctgctgagcatctgcaaggcactttgacccatggaactcaattctcggccccgtcagtagccgacgaagacgaggaagcttgggcagaagaagcgactacgttagaggctatcttcggggaacgttatcaccgcatatcagccaggatctgcgagatcaacagcgaggcatcggatattccacaaaacacgattttccgcttccaaaagccctccgcccactatccaaccacacctcctgttatatcaatccaggccaagggcgtcccagcctatatacgtcttagtgcgatccgtcgggcagtgcagtatgccgaggaaaactttacgggtgaatctatgattttcaacattatggattggctggaggtcaatctgccgagcatcatggagaacccgggtaaattgcgggagatttccgctgtgacggcttcgtcggtagctgagacccaccaaattcctgtgcgttcgagtaggaagaatcgcagaggcattgactggaagattgactcggaacgaagcttggcgatccgtgatgcttgggaggccaaacaagataccgcgccgcagatcgagatgaatcggaaaagaaaagcacttcctgcatggaatatccaacatgaaataatacactctatcaactccaaccaggtgactatcatctcgggtgagactggtagtggtaaaagtacacaatccgtacagtttgtgctggacgacatgatccagcgaggactgggagctgctgccaacatcatctgcacgcagccacgacgaatctcggccctgggtcttgccgacagagttagcgatgagcggtgcgcagtagtcggtgatgaagttggatatgtgatccgaggcgagtcgaaagccaaacctggctcaacaaagatcacgtttgtgactactggtgtcttgctgcgccggatgcaatccggtggcgatgcggatggcaatgtcgcaagctccctcgcggacgtatcgcacgtggtggtcgatgaggtccacgagcgaagtctagatacagacttcttattggcgctgctgagggatgttctaaattaccgcaaggacctgaaagtcattctcatgagtgccaccctcgatgctggtatcttcatgagatactttggcagtcagagatccgttggactggtgaacattcctggccgaacattccctgtcgaagactactacctggatgacgttatccggtacacatcatttgcgccagaacttgccgagggctacgaggacgaggaagaaccccctcggggagaagaaacacttggcaaagccctgcggagcttgggcatgggaatcaattatgatttgatcgcagcgactgtcgaatacatcgattctcagctaggaaaccagccaggaggcatcttaatcttcctccctggtacattggagattgataggtgtctgaaggcagtcagtaggatccccgatatgcatcctctgccattacatgcctccttgcttccagccgaacaacgacgagtattccagagcgcgccaagaggaaagcgaaaggttattgccgctacaaacgtcgcggagacctcaatcacaatcgaggatgttgtcgccgtcattgacaccggtcgagtcaaggaaacgagctacgacccaaaggataacatggtccgtctccaagaagtatgggcatcacaagccgcttgcaaacagcgtcgtgggcgagcaggtcgtgtccgtgcaggtatctgctataagctctacacccgcaaagccgaagcaaatatggcccaacgaccagacccagagatccgccgtgttcccctggagcagctgtgtctgtctgtgaaatccatgaaaggcattgacgacgtcgccaccttcctagccaacaccattactccaccggagagcatagccgttgaaggcgcactaagcttcttgcatcgcgtaggcgctctagaccacgacagactcacagcactgggccgctacctctccatgatccccgcggatcttcgctgcgccaagctcatgatctacggctccatcttcggctgcatggaaccctgcctcacaatcgcagccatgctaacagtcaaaagtcccttcgtctcaccacgtgagaaacgcgacgaagctaacgccgccaaagcaaccttctctcgcccgggtgacggtgacctcctcaccgacctctcagcataccaagcctggtccgagcgaactcgcgctcagggcggctactggggcacccagtcgtggtgtgccgccaacttcctctcccaccagacgctgcgcgatatctcctccaaccgcgcgcagttcattacctcgctcaaagacgcaggcgtcctgccaatccagtattccgatgcgtcggcttcggcctggaatcgcaacgcaaccaatcgcaacttgatccgcgcccttgttgctggagccttccaacctcaggtcgcgcagatctcattcccggataagaagttcgccagctcggttactggtaccgtcgaggtggatccggatgctcgcactatcaagtacttcaatcaggagaacggccgtgtcttcattcaccccagctccatcctcttctctgcggctggctatcctagtgccgcggcatatctcagttactttaccaagatggctaccagcaaggtcttcatccgcgacctcacccgtgggttacttctcttcctttcctcggggtatcaccttctaaccttcttttttcttacttgcagctttcaactcgtactccctccttctattctgcggctctatagaactcgacactgtgggtcgtggactagttgtagacggctggctccgtctacgcggctgggcccggatcggcgtacttgtttcgcggcttcgcaccatgctagatgaggctcttacggagcggtttgataatccttcggttgtctccaatggcagcagtcttgctgatagagtgattgaggctgtcaaaaagttgattgagtttaatggacttgatcaataattcgcattggcgggttccgaggttgaaaatacatacagcggatatatcatcttagatgggaaaagaatcgaaatgatttacgagacatccatggttaaaaaataatcatctatacggtttaggctttataccatcttacgccgccttatacttgtcgcaaggtgataagtccggcatgtgtatgtatactctgtactctacagtcgaccgctcgacatactaatggacaatcctccttccaacggcatgcagatcatggggacctagctaaacatagcttcaaaatacttctcgggacttaaagtgagacagacagacttctgtctcctacaaagataaccgaagacctccgcttcccttattatggttcacaaattctacctcggaagatcgaaagctactccaacaacttcttccgaacatccggattacgctgaccacccgcaccttttagagaagttgatgccttcttctattgggcactgatggatccatccaatctcgctagagtccttatcggtggagagcccttacacccagttgaaggcgttgcttgcaaagttctttcgcgggaaatccgggatcggcttgttgcctatgtgtcgaaaaggaatgagtttcagagtatctatatttattgtcttgatatcgaagaagaaaaggttgaaggtgttgccttgagtagagttacggaatgggagcttcagcctagctggttacagagcagcatttggaaacccaaagtcttgcaagttcacattatctgacagctaagttcttttccggctaagagaacagacctgaagactggatgtcgtacttggaagtgtgtagttaccttgatgtagttatagaaatgggacgtcatattcgactattactagtacagtacaacatacagagtggcgcagagccagtcaggtgacttgtgtagatagagagtgtatcaacggtccccattccccaggggaaaaaaaacgaaaaaaggcggttagaacgcccggagagaaagagatcatcgtcaacgccttccgatcatttactctcatgttcggaaaatgatggcgtcaagtcatgtcgtcgtcagcccagtagagctgggaagaaacaaatccacgaagaaaacaaatgacagaatgaaggagatggaaaagactggaataacacgcaaacgccatgcataaaaaaccgattcgcctgttcacccatgttgaccgaaagaaaaacgagaaataagtttagagatcgtgaatggtggggagtaccagcaatactgaaagccagcttagcattgtatctgcacaccaccggggtattagtttgaggcaaggattagtagtttgcatagccgtccaagcgatctggatcattgagatcagagggctcgggcaaaacaaagtcggaggcaagcccagtttcgacaaagatcgaggcatgcttgaaacgacgatccgaatacttttcaaatatggcggcgtggtggcggcgagggttctcacagcattccatcagtgtgacgagtactggaatcagctgggaataaagataaccactgtaaaatgcgtgtgccggtgtctgattttgaatgttagcaatatgataattgaatgggttggagaagaaaacgtacccagttgcccttgttaagcagcatgcgagacaggcaatgggctccagcagcaataaagctagggggagtgcagacaaagcgctcatccataatagccagctcaaggaagtatttggcaacagtacgagtttcaaggtcgtattcatcagccttgctaatacggcgaaggaaactcataggaccaggccatccaagatcaaagtcgaggatggtgagcatgaaccgttctgccttcagaatctcgtcgacggaatatccaccgtcaaccatgtaaacgatctcttgcacggacggggctgtaatctcttcgaattttgcagcaatgaagattgctgtcgccccaacaagctgcaatttgcccatagaaactaccttgtacgacaggaaacggtcgatgtagtttactgtgaggaacagagtttcagggagcaagttaaagcgcccatgaacttgaacaagccagtccatcaaaaccgcgcgcatggaccactggagttcgctttgacgggccatgtaatcgggaaccggaagcatctcgatctacagacatggttagttcaagctggttatcaggcattgggagagtaaaacatacctctttctttcttagatgaaggaaaatttcatcgccatactccgcgaccatggtcgtatctaaaagttcctcctcaatatcttctggtgtctgttcgctttcgacgatgtctttcgcccggaacatctcacgagtggtcacattgctcatgcatggataaatgacggtggttccgtcggcgttatccccacggaaggagtagaagggtgcaacattgtactcggtatcatccccatcccattcctcgggctcagatacagccggcacgggttccttgacgtatgtgtatgtgtactctttcagatcttcggtctcggaaacggtggcatcagactccacgaggctggcggtatcaacgttcagcacgtttgaaggccgcactacaatactattcaaatgacgccctttctccactcccttgtggctggtcttggcatctgtgtctgtgttggtttccttggatgcagttttctcgggaacggtatgcaattggtctttgaatacggcgttgtttcgcttcgatttatacgccggttgggccttaccggcggggttcataggctttgttgtggcaacgctttcaataacacccttagttcctgccaaggtcatgcgacgttgggctggctgggacagtccaggagccttaacctcaactagagcaggctttccaccaacggcggagtcatcccgactagctcggttcatatccttggtgttgctaacatcgacgaatgcgcgtcggccagcattgttctgggccatcatactcagagcggggctcgatttgttgcgctggtggatgaccttatgattttgatgcagagacgaagggggcacgttctcatccccaacgactcggaagcgctgtggctgtaacatcagttagcatcaatatctccaagttctccaagtgtggtttaggatgaagcaactctagaccaaaagtgggcgaatacacgacaatgcgacaacgcggcgccgctttacgcgattgacgcgtaggtacagaagaatcgggcaaaccagaccataaacatagagctgacttacctttgcatccatgatcgtgaacaatgaagttgcaagacgtgagtgtcgagtctaccttgaagttggtagagagatgttgtttactttttgctcagttggggggagcggagttgcccggcgtgattggccagcccaggcaaaataaacagtcgataggacccgctcactcgttccttcccgatctagcccagtttgtcacttgaatgttacctaggcagaataggtaactttatagaactgactgaacaagtgaatgagcgagaatggaagtgacaaccgtgaagaagggagggttgtcccttgttcctaaagatgtgccttgttgacaatgcacgctattcctaaattggaggttacggtggcgcacgccatcctactgtgcaaactgccctgcgactgttatgcacgcctgtgtcatcatatgtatgctaggctcaaagtttatggaagttttgattaaataatatagagaacatcgaagggaagatctgagtttattttacctttatttgagccctatttgccggtttctcagtcgaatgtctagactagataggtctatcaacctatagttattgaaggcaaatttgcaagataaataccatggtacctctaattagcttctggggtatcaattttatacattgttcatcatcctagtgagaatatgtacattgtaatcatgaccttgtcaaattgatatcaacctttcaaggttccatggttacaactttccgaggtcgaggactcgggacgttgatagaatgttaaatgtttgttctgtttgtctatggtttgcattgtttggtacatctttgacgtcattaaccttatcggcgcgtctcctgcgacgtctgtcgaacatcgtttttgattaaagaaccacgaaaacaagattagatattactaaaaagttatctccaagtacattcaatagtaatgcatagttaccgacaataatatcccaaaataattcatgtttgcgagtacaatcgccattttatatcataatctagatctgacgcgctatctacacgagaccacgtgagagctacaccgccgtcacaagaggtgggacacccggaatgaagcggttcctgtttggcagctttgtgctcaaccgaaacccactcctatcattgcgacggtcgtcggcttttccagtctcgccaagtggtgcggggcttcagatcagaggcaatgagcagtttcggagtaaattatagacagtagccacgttctcggatccgatgatcttcatcgtcaacatatccaaaggaccttttgcgcccagtctctcagcatcaccgcctgactccaccaagcagaaatgttccccccttttcatcgcctattttcttgagaaatcactaaaactgtgcaatcacggatttgcgatgtcccgatctcacttttgtagccaggttccaaggagaaaggaatgatctgtaacgccgatgcgggattccctttttaaccttcttacataggtccgaggaggggtaaatccatgttgcagatcatgcgagacaactccagagagtcatgcgatattatgaaagagaatattctgggtattgaaacggtttggttctttcggtgatatcctttcggctgagtataaatatctaggtccggtcctctaggcggatcaacaaaacgtccataaaccaccctaccctagcgattttgctattaaaccacattataagtgtcgcgatatcttgtattttccaattcgcatagtaaatgagcaatgcgacaagggtgatggtgggaaaatgactggacaatgtcaattctgtccaagcgcacacctccacaacagaccaaaaaaaggtatgggttgctacgtggtcacgctaggaactagctgcaagcccataaatctattgggcgctattcctttatcttattttacacccttagccctcgataccctagatagttacttgtagcgatagttagaggtacccaagctacttgctttgtgtgaagcgctgcatcctcccctccccaacagtcttaggtagcccacactcgcttacacttcatccctcaagactcaaagatcggattatattctcaatttcgtacataatatacaagaaggagggttagacaaagtgttccgtcactcggcgcaatggcatccggcttgcgacagcttttgcgcctttgcgaaaagatacagcattgggatggcttcacacatagttatttttttcgatgcatagaatagttgcaaatcaaatgaagattttatatatattcattaatgccatgggatgtgatggctgcatcgatgggcgccggaagcgcaaatcgccatgtcaccgactcaggcaggccgttttctcgctttaggtgaaaccatcgtacgcacccacctcaaccttcttccttccatccaacaacccctcgaacaaatcgccatcagcgctgtcaacagtattgggtatgtgtctctactctcgttcgatctcacttttcactcccctgaccccgttttaatcctggagatgccaccactgacatagcctcagcgcttcgtagaattgacaatcccctctcgacctcgaccgaacccatccttcgacccttcgccctgtcttggacaatccaggtatctgcgatactggaagtctctgtttgagttgaattaggtgtgttgaaatatctctccattcttctccgggtcatctcgcttgcttcccccaagcccgcctccaaggtcggccggactcggttagcgacacatccatccatcatcttccaagacacaagccatccttattgtatattcgagcatttggaaccccattgtgttaacctctatggtctgttttccttcaggttgcccacatttacccttctgagtcgcttccggctcttgcgactgcagattcccctcccacctccatcgaaggttttgcttcgacggtctctatatttctatatttctatacatcaagaccgggggtggtccatccaccagcctgatcgtttgaattcaacaattgtggtaggtttgatggattcttccctctacacctgcccttcctctgtgtcttgccatggatcacattcccgccctctacggcacacaagcagtgggttgatgcagaatttggtatagcagtggagtattactcaatttggaacactttgatatgcaaccggttcagcatgaagggctttctggcctggtcgagcagccgggtctggcagactctgccaatgtagctcgagacctgtcgctgaaaggcccagcacccaagaatatcgcctttgagttacttcttgatgagaactccaaagtccgagctcgtattccgatgcgcgttcaaatctatccccatgataccacggactcgatcgtcacaacggtcaaaaatttctatggaatatatgacggtactgccagtggggtcagcttcgaggatgaacatgggaccaccctcatcgcaaggtacgagaatctcaagaacaatcggactgtatacgtgcgagtcattcccattcaaccatatggggatcacttctataacgggttcaatgtcgagcctcgcaagcgacccagtctggcggagcctttccagatgttagatggaacgtcgccggcgttagatcagccaggacggccatcctctcggcttgcgagaaagcgcagcacctctccgtcgaaccggagtctccgcagcgcttctcagcacaagcctccctcccgcgcgggcaacaaaagccgggcctcgagcacccatggagctttccatgatgatgatgactacagcgataccgagagcgcttatgctcgcagggctcgcaatgagctctttgctagctcggatatcagcatggagaatatactacaagatggtcgtcgcaaacgacccaagttcgatagctctgtgagtgactcatacgagagggtttttctctatcaaagactgtcgttaatcaatatgttccccttaggagctccccctgtttgttcctccccaagtgccccttactacctccacttcttccatctctccccagcgtcgatcgattggccaggatggcgctgggtcgcctttcgcacgcccaccgcaacccccgtatagttatcaacatgcgcttccatcgccgcagagctatggccacagcgaatatggtgtccactcggggcgcaatacgatttatgcgactcccgtggttccagaccatggaaatcgcatgcgcgacacgggagcctataacagctcggctagccgagtgagtggtccaggtatattgcccacacctgaccccactattgcaagctgcatctccgatgaggatgtggcgatgcaattgatacgcttgggcgatgcgtccaatttctctcacggacgcacctctgcctcgacattggacgatgctttcagtggtgccgctgacgctgcctcatccactggtgctacaagcgatggggaagactttagcgaggacgaggacgacttgccagctcgtcgccagaggttggactccagcccaatgctgccgccgggaaccatcaagcgccacctcaagggcctggatgacatccttcccagcgccgatagcagcgaccacagctcggatggtgcagatgatggtatcaaaagtgaagcggaggaggatatcctttacaaggagtttgcacctaaggcaaagaagccgaaaagccgccccacatctttcaaggttcgcagccagaagcctgcgcctgcgaaattgaacaaaagcaagaatgctatgcccgctcctcgcaaatcatccgagaagtcggctgcgcctgttccacctctcagcccggcgtcttcccgaaaggtctcggggggctcagtcaacttccagcaccagctcggtgcggatgaggaagatctttctaccaagcctcgctgtcagcgatgccgcaagagcaagaaaggctgtgatcgtcagcgcccctgtggacgttgcaaggatgcaggcattggaattgacggctgtctcagtgaggatgagggcaatggtcgcaaagggcgttacggtcgtcatatgggtgtccccgtgaagaagaacggggaagaaatggatgaagacgaggaggagttttcattaacgcctgcgacccctcccgtctcttcgtctatagcagacaagaataagaagcggaagcgctagtggagctgcaggttgcaattgcccccgctatctctaagcgccgaactgtttcgcacctccaatcttcttcgtgaccatggggtctctcattcatcttaccatcctcactatgggccaatctcatccaccctcactctctcatttcgccttcttctggccagcgccagagacagtccttatactagcatcatcatttgcgcttctcactacacattcccttctctggttacaagccatgcttcctccattgtacactgccaagcggttgatctattgttgttgtgtctcttcggcgtcttagtgtttctgtggctatatgcttcttgtcacatccactcgctcattcggaatcaatgctactgggttatttatcattgtctatgtcggtttcatgtgtgtggtgtacggatcagtagcggaagcattatatacttccgagggatggcgaggtcaaagcgtgacaagttgtagaacatatggccgatctcgacctatttcgtcttccgggtagttagggagtcaatgaaagggtttcaaatttttattttgcacttcaatcttccgacgttccatttagtcgtctcatcatggcttaagttacatggagacatggcgggatgagtcacatgacaagagcggtgtgattggccccgcaacttttttaaagagcttaactttctcgaacctcaaaacgcttgcattcttttgccaaacggcgtgttgcttatttctagttgcattttcgcttttaacgggaacagaatttaggtatcccagcgctgagactgcatgtaacgcggtgcgcaaaccagcccctctacacgaacttttctccaaccgcccagcaagccgcattaagcgccttgtctgaaaagcgaccacaatgcctcccaaagctgcctctcgtggaagcgcccgtggaggggccgccaaccgcggtgctcgaaccgacacaactactcctactcccgctggcggggacactacgcaaaatgctcccacggcaactagcgcgcccggtcctgcgagtcgagcctcagtacaacggcttcaatcactgaacaaacgcacaccctccggcagtatcgcgcccagcagtcggcctccatccgcgcttggtggtgagccggccaaaccagtcatgaaacacaaaccgaaggccgttggacgtcgcagcaagcaggagcgagatgagatagagagacttgaacaagaacgatacaatgagcgtctgaaggaggctgccgctatccaacgtggccgtggcggtactgctcgtcgtgctgggttccgtggccgtggtggacctatggctatgggcatgagtggatttggtggccgaggcgggaaactaggccgtggtggttatggcggcggaagtggaggtggttatggaggaagcgcaggcggtgcaggatcaggatacaatcggtctggtcttactggggtcaaccgtgggcgcgcatatgactcttcagacgacgaagagaatgcactccgtgtcagcatcgatcatatcaacctcgatagcgacgaggaggattgggatacgccgaaggatttcaagggcaaacaacctagcaggtcgagcggggaacgcggacttcgccctgttcgtgttgagcgacatgaacacgaggaaagagtcatcagcgtcaacatggaatctagcaccagcagaaccgccgacctccgcaaaaaagcagagaaggagaaagcagcgaaggatgtcggccgtacacctaccaaggttaaacccgaaccccgagacgacgatacaactatgccggatgccattccacatgcagatgacgatgacctcctaccagagcataatgttcgtgtgcgctcggctcagagcatgagcccaacaaagaggagcacaacagaattacgatcgattcaacccacgcctgagcccgaaatcccagacccacgcagcctacttcacactaaggaggaaatcgacgaatatgaccgacacatggaagatttggctataattaaggatcttcttgttcccaaggagtcaaagaatgccactacagaagcagaaactaccgaaggagctgccgaaggtaaacccgcggcagtggaaggacaggaaggtgaccaaccgaacgaagaaaaggaagaagaacaggaagaagacaaccctctacatggccagatgttcctcatgcaattcccaccgatgaccccctacctcagagtcgccggttcttcccaagacaatcaacaccaagctgcagcaaccgcacctccgccgaacgagatcaagcgtgaagcgggcgacgacgtggaaattgtgggcagcacccaagcaaccgaattaaaagagaacagtgtcattacagccggccatccatggtctttgcccacaggtcgtgtcggcaaattgaatgtacaccagtccggccgtgtgaccctagattggggtggaatcagtatggagttggatcgtggagcaccggttggtttcgtccaggaagccgtcatcttgtcgaaggttccaccggagtcggaagaagacataccaaaacatgtttggtctatgggccaattatctggcaagttcacagtcacgccgaactgggatgagatgctttgatacctctacaaggcatcttatgatgaatggaaaagaaatttgcaagcttactgcagcaattgtcttggttgttaacttgacaatcaccaaaaatagttagactggggtaaagtttcccttttcctcctcaagaattcaactttgaatcccatctgtagtcacgtgactatttttatatgtatgtgcaggattgcgatagagatagctagttgtctctgctcgttctttctctcccagtctctcttcgtagctaagagaaaaatacaactgtattgcacgctatattccaacttttgtgtgactttacaatggctgcggaccagcttagtaatttcaccaaaagtgccaaggcctagttaactatcgcgcaagctgctccgtacacgaactttatttgcgcgtgtcgaattcagagcatttgaccattacatcctccatgcccaatagcaactacggtcgagcacaagcgacaattcagccaatccaactactcataatccctctacaatgcctgcatagaccaaatcaagtgtctccggtgctacacgagtgacgaaccttcgccatgtcgttgcgtcctctcggatatcaatgcaaactcccctatgcgcaattattccgcaatggactgcaaacaaaacaaaatatcacacaacacctgagatccttttctcaattacgcgacacccattgcgcacgtcgctggtccgcgacatttccacaccatgccaacaaagctttttcgctacggagcttgctcggtgatcttttgagacctgcacacactattcggggccagggcaagggattgtgggctcaacaatctcgctatgagagctctgcggccaaagaaccagaactctgcgcacactgcggtggaaaaaccatccccaaggctagaaaacatgtcgagcctggcaacccctccagcggctggtattgcaaaccctgtgttcggaacatccgtgcccatggccatctgccaaatgaggagcagcttgcaggcatccatcggcggaggttgatcagggcgagtggagaggcaagcaaaacaagcccatgcgggcactgcggccagatgacagctccgagaagcagccgtaaattcattgatgcgaacaacccttctgctgggtttcactgtcggacatgcgttcggcatgtcaatcatcacggtaccctcccaaccgacttagatctcgcagcgttccagtaccgcaaacagatgcggagtaggcgtcctcctactgtcgcctcaaaaaataacaagtcagttacttcgaccggagaatcagcagtggcccgcaaaccttccaagtctcccaaacagatgaaacagagccgcggcgaatacccttgcatgcactgtggtgacaaaaccatctctagcagcaaacgaaggctcgttgagccccagaatcccgcggcaggttactactgccagccatgtacacgatctctacttgaaacggatgccttgccaagcaccgtcaaaattgcagcgctcaggaaactcagagcgacccgtatgcaaagcaacccacgagttatgaaaagcccttgtgtccactgcggtgagatcaccgcccccagcagcaagcgccggctagttgaagcgaagaacgctcaatccgggtattactgccgcgcctgtgcggactgtttaatagaaaccaattccctgcctagcgacatacgccttgcagttcgcagagcgcgagagcaggtcaggctgaaaaacttgcaagccagtctatctaaagaatcgcagtccccggtatctccgcaggacggagaagctacgccaacggatattctcacggacaataccgcaaaaacttgcgcgcactgcagaaccgaagagaacacgtcggaccactgaacccggatatgtgtttttgtgtgtggagctttttgatctcaacggcttgtttttgaggctgggggtacttttgcgcagagaccgcatgaaaaaaaagtacggactcggattagagcggatatcaaggctggtcaacggttggattgctgccagtgcaccgcgtgctcaaatcgatggccgtcctttgatctggtcgatgccaagcgcaagggtcttcatatcttgattttagtaccacccataaatgcgcgtcgtcatcttgcctgcggggtgtgctcgtctattcgcccggactttgcgcctgcgttgacgatcctgagtggcgctgtccgttaagcctcgggatgccttggagctataattagaacttggcggaacaaaatgggatttttattgtatatacagggggtggacatgtatgctatagatgcatatgtcaataggcatctggaattattgaatcaccctaacagcagcgcatctaagaagatatcccgactaaaataaagaataataaagaataaataaacactttggatagcttcagacctgggaaactgggtaaccaatcagagctcgcagaattcagggacacacccccactcctggacggcccagggacacagggccaaagaaagccaaagagcggctcggccaatcagagcctcggcctgactggcttcattttgtttttcccttaatttccctttcccccccctgggctgtttcggctttttgggttcttgttcttcttcgttctctctttcaatcctcctctacggctaagagtgagttgggttctgacaattgaaagagtaaagacgaaataccccggatactcccctcttccgtgtttggccccctattcccccggttgcctgactgcgacaattcaacacacccactcggacctgagtggcatgctttgagatcctcgcaacttataccttatattcgtgaagacattcatctgagtcatatcgtcacttccaacctcttctccacctccatctgcagactgcagcactgttgccttgccaactccagaccccccgatccccacgacccgcaccagtcagcttggcgttgcttgtcctccataggcaacaacgcaaagcatttgcgcgccagtctattttcatacactatacatctataatctgccacaatgaaaccatccaccttcctggtcttccttgccccggccgcggtgctcgccggctcacaacaacccgccgcaggtgccagcctctcctccgacattgcacacaattcgcccgctgtctcattaccagaactcgctccgcgggaacagttcgcaccatttgcggaccatgatctgccatctgatgagatgcgcttgctcgctgctcgctatgtcctccgcgcgcgcagtgagggctccctcggccagaccccatggattggcatggcgatcggattgacctttactgctctggcggctgtcatgctcgggtgattgtcggcatggaatgctttgaaacgaaccctagctcgactgatccatatacctctttctccgcctcgactacttctttttctcttgacacgacacgtgaaacgccgggcaccgctcgaactctgtttatcttttactccgctcgacatatttctgcgacccttcttctttatcttcattttcttatggtcttttgcagcgaatttttaccattttgtttatttttgcatccatggccttgtgttctggcgtgggattggatctttgagcccccttttttacctatcgcattccccgacttgctgagttacttggtactgttgggagtatagagttacatgttgtacgcatgttgtacatgatacctttttgtttctaatgcagattctcccgtgtgtatgacctaattagtatatatagatatggccaatacgaactgactatacgtttttgcttttcttccttttctttcagaccacatttttcttagtttacgcctttctcatggctagactcggactggggatggctttctttgttactagatgagcaacccattgccagggcaaacacagagttctcgagaactgtcatattgatattttggtttccttcaaatctattttcaaatacccttagaaagagagatctttaagtgggcatataccctcgctacactcgaccccaaagacaactatactacagccctaactttcaccatggcctcggacaaatatccaccctacgtaccgatgccctcgctccgccacgagctagggctggtgttcggcttcttatctctgtgcatagtggttatgggagcatacgttgctctctggcgtggtgagttcccctcccactctcctttccatcatatatcgatgtaaagatcagcaagaccgtccgtggtcatgtcaaacacatacgtacatacaacttcaatgcgatttacttcagcataatacctacactacccctaacagccagccccagtatcccaaacccgcttagacgcccaagacctcgcccgccgcaaagcctttcgcagcaaaaccccaacccaacaacccctaggaacaaaaccccccttaacagcaggccgaagcccaagtcccatcaaagacacatccacatcaaactccaaagcagctgtgcaagaaaaaatgctcgaccgcgtcggcatgcccgagaaccgtgccgagctaccagtccacgggatggaggtgtacgcggctggaaaggggaatgcgagcacatcgcaaatcagaagtccacttggtcaggctatgccgcttagtattgttagtcctgttggtccgcttgggggtagcggggttgcgggtagggctgctagctctgttagtctagttggaggtgggattgcgcttgagtctattgttggggtggcgttgaaggagggagaagtttgagtcgaagtcctttgcgcgttgatgggttccggtcggtgagtccggcgagaaggtttgggggtggaattggtccacctgttgagattgggcctgcgcctagtagggagtaaggtgttgcattagtttataatgatgtaacatattattttgtatcgcagctaggagcaattaatatgacaaggagaacgctaagagaagtaaattttagactaagtccacaatgagagataatatttgtaatcggtcgatgaatgtatgtaccttgaaagaagaagaaattcgggatagggttatgcgggtcagaagtgtgaatagcttcaagtgatcccaaaggagaaaaaaaggaccccagaggttcttcaacagcagctagcctagggacagtttcctcgttggtattggactaatctcaccctgctcgaggaacagagcacatcccatctgagccatgggtgttgggaattacaatatctgccttgacctttctatttataatcacttttgtttatcgttccttcctcggcaaatacccaggaccgctcttgtctgggagcagcccttcctgccattccaacaattgtcgtaccttctaagattccttctcttctactgagttccacgtcatgcatggcctactaagctttctggaagtatggcggtttgatgctttggaaaaattttgatattgtctccaagggttgtccatatcaattcaactcatatagttgacattttgaatccttctgggtatattttacattacattacaccaccagtcatctatccacacaccggctcgtcaaacccacgcgtccacaacaacgaacccatgatgaccaccaaaaacccaagcgcgacaagcacactggcacttccatacaaatacgcatgacgccgatgagacagtcctttcaattcagcaacccaggtactgatagtggtcgtgctcccgcagaatccatccataacaccctgcagcacctggcaacctgtcagagcagcaggaaccacccccccaagatcactgacatgctgcaagtcatagcacataccctcgatgatggtcccaaagatattgaccgtaaacgtgccgagggggaaggtcggaatcctgccattcaggtgcagcgagacatagaaccgaaggagacagccaagcggtgaaaagacaatagcgaacaccgcccggccgcgccacacatccgggcctttatgtcggtctggcggccagatggccaggaacaccgccccgagccaacatccccaggcaagcatgaccacaagagggtcgaggactcggcgcgtgaacgcgaagggcacggtgggtgtcacgcgtgttagagccagggcaatatgcgcgccgacgataagtgccgacaggctcagtgacacggtgagtataatcacagcgaccagcgccataaagctatacccaccattacgggaggcaatgtgagatccggttggcagggatgggtcggggagggcatttgccagggcgaggaagacgtcccgaataaaggacgagaaggaggtgaagcagccacagaacccggtcgtcagaccaatgtacagagggatagtcttcttcacagccatgtgtttccggcttttgactttgggctcggtatcaactgcatctgcaggtgcttctttggttattgttttgccccattcttcgcggaataactgctggtcttcgctcaggaaacccattaccaggcttccggctacatttgcccataacacccctgttacgacaggcgcgcctgtataaaatgtcagagcctgtaggcctaggcgggccagtgtaccccagagcgagaagaagattagataggagacggtgtagatgtgggttgcgtgtttggagaggggcggcgcagcagatgcaggttgtggtacaggtgctgcgcggtcacccgagttttgccatgattcatttgcattcgcctgttgggcctctcttgaagggtcattgtttcgagaggggttatcaacatcggcagttgatggcattgctgtttcagtgttgaagggaggataaggggaaaagtttgccaagaaccggagaccggagatcaggtggagtccgataagattaacggtcattcgcagagtatatgaggggaagaagataaagaggtgtgtcttgtctccctcctcctcctcctcttcttcttcttcttctctctctctctctctctctttcctctttcctctttatataccctctatacttcaccatgtctctcccatcaaatgtccacgtctcctcccatccctgtctacaagccaagctctccctcatccgctcatcttccaccaccccgcgtgagacaagaggcttggtccatgacattgccaatatcctaggcgttgaagccttctcggggctgaagttagtcaaaacaggaacggtaaatagatccccaagaccgagatccataccagcattgcgatctcctaacactcattcccaggacaccacgcccctcggaattgagtatgaaacccagggcattgacccattagacctagctctagtgccaattctccgctctggtctaggaatggttgatggtgagtgattcttctattccgcgtgatccgctctagccagcactgcaactgtagcccatgttattccctgcaatatgaccatactactctcctattccccaattcccattcctatatccaatcccaaacaccacagttgcaatttcattcgcatttacagcttatctcctcctttcgtcatcccccccactccctatccttatcccccactcctaacacgtccacgggtccaaaaccccgcttacacaaccccacagccctaaacgacctcctcccaacctcagtcccagtctaccacctgggcctgttccgcgaaaaggtctctctccaacccgtagaatactacaacaacctccccttccaccggtcggagctgtcgccggcctcgccagcttctctgaacccaaccaccaacaccgcagcggcaagcctggcggtgctgctagatccggttatcgctactggtgcgacggccgaggcggcgatccaattgctgcgcgattggggtgtgaagaaggttattatgcttagcttgcttgcttcggaagagggggttaagcgtgctgcggggacttggggtgatgttgaggtttgggtcggtgctattgataagggtgttgatgagaagggcatgatcgtgcctggtattggtgatattggtgatcgcttgtttgttgctgttggaaagtagacttaactttatcagcagtgaagcatggctgttgagggtttagatactacagatgattatgtacctaccactacaactacaacttcgctacaaatgatcaaggctttaaactacaattgaagtctacaatctagtatttaggaaagaggttgtccccgccagataattcatcgataacgtatagtacatggaaatggcataaaacatgtgcaggtgaaacaaatgcgaaaattgtcaaagcaatgctgagcgttaagagcatggaaagcaaaagacggggtcggaggcgcgcagacaattaacatcaagtacagcggctggaagccaaccaaagaaatagaggtaagtggcaagatatgagaaagaaagaaaaaagaaatcaacacgcacgcgaacgcatgaaaagtcaaaaggtatcgaaagcacgaaaatcagatggacggggggcacgattaggggttagtatgaaccataaagtcaaactccacggagtgcgaaagtacacacaggaccagccaggtgtcgaagacggaaagcagaaacaccacactggactccctggtgtaataaaaagcaggggaaatgcaaaaaaaagcaaaaaaaaagcaaagactaggaaccaccgagagggatatcaaaaggcgaagtattccaaaacaagcccaacaccccgcctgcccactggcatgtccagtcctagttccgaggtgtcccaatgaaagcgtccaacaaatgagagtaagaaattgaaaacacaaatttcaagaaaaaagcagaccgactcaaacagattgaagagaaaaaatttagtatgcggtgccgacgctagcaagcgacttagttggcaccgcatggatcggctgatccttgcgaacacggagagaatcttcgtatccgaccagggcctgagagtgaagcttgaatgattcgcccatcaacttggtgattctgtaaagcggttagttactggaccataagagtgaatagggatgaaaacgtacccccagacaaccacgccgtctaggatgttaccccatacacgggcgacagtagagctgagttttccaaaggcgtcgatggcatcgtcgtcaaacagattgcggaccttgttgtagagggccaattcagcctcagttgccggctcatcgtcatgttccagacggtagagccagaggctcagaatgaccatcagatccaggccgcacagagggttctcaacactccagttggtggcagatgtcttggcaacccaattgatgccctgaatggcggcaatctcgatgcattcgaaacattgttggataactttgttcatctcctgcgaacgcttgaccttctcacgagcgacggtcatcgcagccgccacctcatatgaggagtggtaccgcatcgcctcctggatggatttaaggtcaacttccaggcgggcgcgggtgttgcggtagaccgccatcgagttgaagatcaaggggtgacccttctgaggggtgctaagcgggaccacgatcgtttccggttcgcacacctcaagggagttctcccaggtctcgagggccaggcgcagcttgtactcggtaaccacatcttggagcgcctcgaagctgcgcttgtggctccaaacttgcaagaacaaggcgttaatgagaacacgagtggcgaaagcactgtagcgtgtctgttcaccctggaaaaggcagtcgtgggcctcacgcacagtcaaggcgctcgagaccgtgccacggcgccaactctcatcatcagcctcgtccaaattccagagagactctgaagatgggagctccaagtcgtcaaactcatcgaagctcatagcgggggtgtgattgaatgtgagggtcaacatgccgaagaaaatatacacggcgaaatatgtacgacggcaggattcgtcctcaatccactcctcgcgcgatggctggacattctggcgcgcctgagtgcgcaacttgagctggtatcggttgccggcgaccatgttggccaggagactcttgatcgaacaagtccattcaaggcccttcgggtcaccactccagctctcaaataccatgttcaacaaagtagcctgcatcaatgtcaaggggcacttgcgggaatcaaaattgtccttgtgttgcaggaattggttgaccaggaccttggagccgacgtggagcatgaaggcgtgttcgcgctcgaaagtgtaaagagcaccaatcgacaaaaccgcaagcaacagcggggctggaacttgggaaggcttaaatgattcctggtgcaggaatggcaagtgaggatggtacagattaaagtaggtggacaaataccggttcagcgcaaccgtggaaggaagctggaaagtatctggaagcgcacctaggctgtctgatccctgaatccgatcaactacatagttgcgttccatctcgttagcgagctggggagccttgggaagagtcaacgcttgactagggccaggtgagcgacggtagttgaccgggctgaccggaccagtcatggaggggtagggcgacggcgcattcggggtagagtgccccgacataggcagcgagttggacatcagaaggtcgccgacagggccatggcgatcaacgagggtgggcattgaccccggttccgcgggggatatgagcgtgtcccagggcatctgaggcagagtggcgttgcccgagaggtagggctcgaaggagccgcgtcctggcgaaagcgattcggaacgctcggagacctgaccggtcgccgctgctgcagccttatgttggaaatctgtcatcaacatggctgcagtttcaaggtcgaccataccatcattgctgctagcctcgatctgctccagggtcgtcgggtcaatggtgaccgacggccgagctggggcagatgagtttttctgaacccctccaccgcgtctgcgtccctctgcaaccagggggataccgccatccttggcgtgcaccgttctgtcatgtcgcagaagaagatcgcgacggacgaaggtactgcggcattttaaacacttgaagggtctttctttcgtgtctatacattttcgagtctattagcggggggggaaacaaaataacacatagggaatgttggcaatcttacgtgagcgctcatggcgactgcgatgttcacttctgctaaacgcgcgattgcaaaattggcacttatatttcttttctggagctgatgttttcttggccggtgagttggccgtcccaggtgctgaaggtgccatgtgtgcgggttatctcttagcaagagagtagaatggacggtggtattgtcccctgagtaagctcgcaccggttctgtaggcgtgtcgatgacaggatttcgttgggatgtctgatcattccttgagcggggggaaagggaagtaaaggtatatcgagagtggtgtccagccacaagtaggaaatattaaagaagcaaacgctgaagggaaaaaaagaatggcgggatgatcaaccgcgattagatgaggaaaggggaggggaagaagagaggggaaggaggatgaggagaataagaaggaatttgggagttgggaaatcgggttttttggttttggggggggnnnnnnnnnnnnnnnnnnnnnnnnnnnnnnnnnnnnnnnnnnnnnnnnnnnnnnnnnnnnnnnnnnnnnnnnnnnnnnnnnnnnnnnnnnnnnnnnnnnnnnnnnnnnnnnnnnnnnnnnnnnnnnnnnnnnnnnnnnnnnnnnnnnnnnnnnnnnnnnnggggtggagggggagaggggaggaagggaggggggggaagggaaaaggacgtgggtttaagctaatcgcttacttttacgcgtcgaagtacagaccagggccatccgagggtaaaagcgggaccgatcaccgcgagaatcaccgccgagcttatcatcgcgctacctaggtatcccagccacctctccggccacgcactttaccttcctctgtccacccactatcttactcaaatgtgccccccctttctttaccatacaacatacggaatcgacacgtaattattctaaaaaagccctatagatttgtcccgatcgcaagcccacatggtctaatttgattttccccttggatctttattatcataattaaacactacagggtcgatcatttaaatgtttttagaaattgctgcgagggtgatttacatgtactccgttgtgggttaggttattgaatcgtgcccctcgctcagggtttttatggggacgggggaaattctttgtttatcgaaattatgtggcatgtgaggcgattcgatcgtggcacacttggagaggctgtgagaatagccccttattcactaatctcggaggtttccccctacagggggagtatatcagtctcacctgagaaacctggaaaagggtatcgtacggtttgatatcagaccctagacattgatagatcgcaactatggttcacatccgttttacccctcaacccctccagtcccaagatccacagacaacatccatggatacatacatctatatcaatttctagggcataactaccgacgctggtatactgcttacatttataatatcgttgtcacacaactccgaatctataatctatgcttggagaatgagacagggatatcagatatagagttgcatttatcttctctgaatgtaagaatgccgatgctgagaatggcactttgatgcgctggagtatacacatccccacgctaaaatagttacaccaatgtgggaaagtagatcgatccaacatgaaatcaattctatgtctgggtgcccatcagccccgtctcctgacagatcatcccactgtacttttgtcgcctcacaaattggctggtccagattcagtctcagctgtcgccctccaaccctaatatagttgcccccgccctgtggctgttcatctgtttgactgtgccacgctcgagattatgtgttccagccgtgtacaactgcattatgtaggattgatgtaagtaccctgtattgtcctcgaggcatcacctgccgaactacatccagaaaggatcgacagagcagaatgcaaatcggagcgttggatgggcatcttctgattgactagttgtacgttgtccttttagtttgcattgccagcacaaacgattacggctaaccgcgctacaaatgctatactacggccgaatgcctagttagctgtcaaatctttcgaggctccacacggtgaagttgcagttttatacaccgcaaaacctgccagtcatgtgtactctccgctccaaagtaacaccgttacctatcaccgagctggaaattgggaatcgcgagttcccgggtcctatcagtggggcgaagccaacacttacatcattggagcccgaagatcccggacgcggaccaccgacgcggttacttgggaaacgcgcttcgaacacggcacgtctctttcacctggacaagcaaatggagttggaattagcacaagtttcacctcatatcgaccggcatatggagtcctatctagcctgtacctgagcacccccttgattcgcggaagccaaatccctaaatcctgtcccggacttccggttgatcatcgaagcctgggcgaaacttcatctgatctggtggatctagacttatcaactagcttcaagccccggcggtgaggtcggacggcttaggtttttcaccaagggatcaaaaccttcgattcttgatgcaaacccaaccggtcgacctccttcgagctgctgctcggtccacttcccgatgcagcggaccgacccagtctaacgctctcgacccaggaacgaaaagcaaaacaagttggcaatgatatcaaacggagagcggtgacttgaccgcctggcaaatactttattccttccttgcctcgaaaggtaatacaccagaggatccaccattcccaatcccttgggccgcaagtccgggttatgtctttggtctttcattccatgcccctccgagcggtcaaaagcacgaacaaaagaaccatcgaaaacccgcccaattatggatctgcacggaggatccaatcggaccagttacgaatcagatattttcgaccattctcccttcgagctctgctccacctcagcaagcccactattgtaacaagaatttcaggaacctcttccccggtgccccctgagctagtggacaccgacagacgggcgttgctggagcccatcgtcccgactactccatagccaaggtccggcgtctccgccgtggacgccaggacggtctggaatctcccaactcggtcctattctgtgagtaagcccaagccagccgtctccaagccagacatgtcggtgaagcccgtttcgtgtcaatatatttggacttcaccgcttcggcaagattccaactcggtaggttgtacggagtatgtatgttgtatgaagaatctattgaacaagcctgtccccacgggtctcgacttcaaccgacttaacggtgtgagggtcattattgatcgcgtaaatcgggaaactggattttggcttgaaattcaagtctccattgtgcgcgctatcgccgatttactttcgctaaataatggaccccaacatcccagcgttgagacaaagccccgagtcgctctccacccaacgcgtgctttgtgttgtacgtcgtaaagctctttaccagacaacgggccgtcggtgggtttcagagtacggacgtattacacaataatagaaaatgcgcctgcctactcggtccaggaagtccatttccgaattctacgttcgcaccgaccatcccgacacgagtctggacttcgggcgcccgcgtcttgtaaccgcatccagcgacacgggtaaacagaagcttttcgtgtagcgtgtagcatgtggatattgagaaacctgaaatataaaattcagagccctctactccgtaggtatggagtatgtacggagtcctatccggcctatgttgtgctttgtctagttgtacattactgtactccatactcctactccgttcatgtcgatgatctacagctgcatgacaggcctgttcatccaacttgttttgaaccatggaaacatgatcaatcgcagatgcgatcgcccaatccctggatcgtgacggaaggggacgtccggggaagacctcccggtccatggttcactcccggagcttgattctcttcgtatcagacggacgagtcacaattccatttctgcacaacctgcgagacagactgaagcccggccgatttcagtgtctgcacatacatataacgtgccgtgcatagaaacgcaagtgccctcctcgaccccttgtcgcgttggcaaattagctgtgttgattggacgattcctccgatgcaggggatacaccacatatgcgagcaccgattcatcacattcgcgagatcgttcaatatcatccatgcatttttactgtgtaatattgctgatctctaacatacttatccaacggagatggtcccctcctccccccgcgcggagatgcgccgtcggaattttctcgaaaaaggtggacacggggctagggagactaaattaggaaattgacggagaacggagggcccggagagcgctcttcgtttggagtgtcgcggcttgattgctcgaaccccgctaaggtttaaacgtgcgacgcgcccgtcttcgagaacataggaatcaccgatgaatagactttcatagtgtagacttgggggggctactccatccgataacaaaggcaggcgggaatgggaagtaggtggggaactggccgtcgtgtcgcatcgaggtgggaagaagaagaaaaaagaatgaaaaggggggagttaatgatcatcggagacccaggactccgggtaaacaagagggtgggatcgtgtcgctattgggtgtgcgctgcaccgagcggcaggattgggtctcggcaggtgagaatctctccggctggggcggcttgtgagtggtgatgatgtcgtctgggttcctgcgactggctggctgcaaggaacaaggaacgagcgtcgtggcaattttttaatttgaagcccgtttgagttgctatcgggcttgccctggaggagtactccgtatacagcttactccgaaggtctaggcgcctcttggtttattggatttcttagtctcattctcacttactttctataacatactccgtactccatccgtagtcagataaatcgtactttgaagaatcaggggatttactaggtactcggaacttggaattcaacaggaataggatattgagatacggagtagtggtaacctttatgcacttgcacacttaagatatggtttcagctcattctcctaatggggaaggtgatagagagctattctggtaaaagtataccaagtaaaacgtatgctacttatgtggaactttacgtgagtccgattgtgctgtttcttggtgtctcatgtctgtttattctgtagttctgaggttgattttaatagggctcaaaatatgtgatgttattggctagaaatatgtcaatatatatctataactaaggtcgaatatcttcaacctattttcttgtcaacacatagatcattctatccattgtcccataataccttcgattgcaccatacactcgtcgggaaacgaaagtaatgtagaggttggtcccaagtcgagaccctgatagatgttggtaaatcctataaacctaatcagaaactgtcccctgaattggcgctccgcttcatccgatattaatagctcccagatactggagtccatgacgaggagatgtatgcatatgctcacatcggcacaaaatactatcttcagatgcaggttgatatgcccaaggaacagcttgcttacaatgttcctctagagcttgctcaagaggcagcttccagctacattgcatgaactttctcgcctcgacagaagcggaccgagctctacagcgtgttgtaatgatacgatgctactacatcattgaatcctgatttgctttgaatatgccgaacatggcattaatcctccatgcatgagacgccgaaccttgtccgcagagcattacgcgtcgccgatgagcacacaaccctctcaatgctactcaaccccacgagaagaaacggtccgttgagtggataagtttccaaaccctcgggtccattgtgcatggccttgaattgagaaccaacggtcttacactacgtaacctatcagggtcgaagcttactttgaaaggttctcgatacgcagggagtttcatgcaaaaataacaatcgcccaggtggagattcacggaatactccgtaccatggttgaagtatttggattggctgttcagatcatgccatatgctgtcagtacgcctcatccgagaagccaaaggattgtgatcgcatatgtacaacatacggagtactctgtacgaggtatagcattccataaagtccatatgcgttgggaaacatcgtacataacaaagttttacctctaaggagttagtcttgaaagctggggttaggaacgaggctgcatgccatgcagtaatatatcaccgaccctcttgtctatccacacttacatcaaccacgggacttcattgccctgttttggccattacgtgtatatcatgtgtactccgtacaacatatgtacctacattgttgtatgctgttaggtatggtaccggggacgagcgccaggatatccgattgtggaaagtgggaacttggaaaacccactttagagtagctcgaaattaaatatattaaaaaccgccttctagaaccattttagcgcctattgattagagaataatagacatcttttccggttgtctgaaagagttccatggatgctataatagaaacaacatggaagataacaaaagtgtctttcgtcactctggggctgggcatctggtctcgttggatatcgagcatatggaccctatcgttcattcttactgagacaaggttgtcgggtttgcgcatatcggctccccgaggtacataatgcagtagtttttggatccccttactggttcaagctaggatatccttgatcatttattgaatggagatagtaggaattcagttacggagtacatataatgtgtcaaatctaggaaacttgcagctcggagatcccatgtcgttcttcattgcaaattgatagatgtctccatgtgcctaaccaccaattaccataattgaatttgtcttttgtgggccttagaccagtcttccacggagtattttctaatattcttgcctctgccatcaaatttgaggctatccgtggaactacttggtaaatatacaaatgtacctaagcaggatgacagcttgaacccgtatgggcaaaatgtgaccctatcagcatgcctaggtacacccggctgttataagcgtgcatatttcgtcacacgcagacacacagacagtggggaacgtcatgctgtgaacgaaagacgcagaaccaagtatgtaataataaattagtctggggctctagatgtctccaggaccaacacacggacagttgcccccattagtccaaggggcccagacttggacttcctaaaagctatgtcaaatgcaatttagagtcacatcatgtcaaatgggatgtggtacctgtaagactgtagatatgcaagtctataattgacagtatctcatcttggtgtcattggacgtcgtgttcatgcaacgatagaaacattgaatatttcatgaggatgtatagtattgtaatcacatggtatctttccgctggatccccctcaaaacagcctttccatgggctccatcgtgtattaataccggtattgcatgcgcccgtcccgcctccacctggtgcaacttcccctaattcaatcccacttccatttccccattgcctttgttataactcgttgatggcataatccgctgtgctggattcttgttctttgactacgcaaggtcttttttcagtctgggtaaaaagtgactctgcttccctcgcctcaacgtcgaatatagtcatgagcggatattgagctcaaaccacccccccccctcaacccctccagaagctctctggactgtggccctgtgagtcaccgatgtttgggattcgcgcggcagatttagctgtcgacactactgcgctggccaaatccggatctgttgcgaccgcattcgagtacaccgacgaacaagtgaccacgcccacagccctatcccgctatcgcggtcggggaaacagtgtatcacgagatttcaaccacatcaaccattccccgagcaaaatggcctctggatatgcggtcagcccggagccccccgcgctcttcgtacgggccatgtacgactatgatgccgacgatcacactagcctgagtttccgccgtggcgacattattcaggtcctcaaccagctagaaaccggatggtgggatggggtaatcgatgatgttcgaggctggttcccaagtaactattgtaccccactcacggaagcggacgatttcaccaaccagttcgcacacacccaccttgaaaccgagctcggcgcggactctggactcgaagatgaatatggcgatggacatgatgaggatgaagtgcactccgatgacaacgctcgagacccacagccgattcttcctatggagggagtcgcagcgcccaaggagcaggaagaggccgcattctggatcccccaggcgacaccggacggccgtcttttctacttcaataccctcaccggatattccactatggagctccctttcgaaaacccgaccgcaacaatcgaacccggcccacgagatcgaaataatttctatgtccccgaccagacacggccacccccggagatgatggcccgtggttttgagcgagatgaagacgagtacgatggctctgcatcggaggccgaaggagaatcattgatgttaggctcgcatggctcgatttctcgccgacgccagtccgtgatggacgggatatcccccgccacgtctatggattcgttgtacgccccaggatctaaagatttcaaaatgccgcacccgccgaacaagcgcccgcaaaaatcatacagcctgggcggaaacagtaccagtacatctatgaccgaaagctattcgagaccttctatttcctaccctcctcagcattttgtcgacgatggcttcgcaccaccaataacctggcctttgcttgtggataatatgcgccacgccgtggaatcttatcgccaaacgcttttcaaaggtgagcgtgcagagtatgtaagaaaggccgaggacatatccgaccatcttcgcatgctgcttgctgctggatctgacaccacggataaccactctggcaacccatctatcatttccacaaacaaggccctatatccttatttccgggatatgatgtccaaattctcgaagctggttctttcatcacacattgctgccgctgattggcctggtgccgactcggccaataaatgcttgcaggaggccgacggagttatgcagggtgtgtatggctacgtggaagtggcacaacaacagcgcggagatgtgattcatcgcattgtgcctggcttcgtcagtggtagctcttccggtggtagctggcagaacaatggtgtttctttgcatacttcaggtccaacatcattccttgtcccggatggagactcgcgatcagagccttcggtctctcttgacactgcgtttttggattcaatcgacatactcaggagatcttttgttggtagcatccggcggctagaagagcggctggttgtaaaccggaagatcgtcacagcgcaggaacatgcagatattgcggatgcaatctccgctgctgcaatcaaggtcattgaacagtttcgcccatggatctcttctgtcgagtcgatgaatttagctccgttggggaccagcttccagaacccccagctagtagactttagcttgcaaaagcagagagcctacgatgctattggagatttcgtcctgagctgtcaagcagtttccgcccctctggccgatgagtgggccgagcttcgtggtaattctctcgacgatcgtgtgaatgccgtgcgaggcatcgccaggcagttggagaactatgtctcccagattggtttcccgctgtcgctgctccttgagcaaattcccaccgagccagtatcatctctacgacgtggtagccgccaggaatcggatgatgagtcgttcaagaagatgcatagccgaggcgagtccatggccaagattgcagagtcaatcggaattccatcctcctacgcccctgaaaaagaaggtggcaccgataaagtacgaagaaatatggacaaggcccaacgattctttggccaggcacccccaacagctatcacgcgagagccaatccgtgagccagtccgcgagccagaagagactccctggttcttgaaaatggcccatgaaggcgaagtgttctacgataacaagggagacctgccaatcctcaaatgtggaacactcgcgggattggttgaacacctcacccgccacgataagcttgatgcatccttcaacaacaccttcctcctcacctatcgctctttcacgactgccaccgaactatttgaattgcttgtccagcgatttaacgttcagcctccatttggcttaaatcaagatgacatgcaaatgtggattgatcggaaacagaagccgattagattccgtgtcgtcaacattcttaagagttggttcgatcacttctggatggagcctaatgatgaactgcacatggacctcctgcggcgtgtccatacttttaccagcgactcaatcgctactacaaaaacgccaggaacccctacattattggccgtgatcgaacaacgacttcgaggacaagacacaaccgtcaagcgccttgttccaactcagagcaccgccgcaccaacaccaattatccctaagaatatgaagaagttgaagttcctcgacattgatccgacggagtttgctcggcagttgaccatcattgagtcgcgcctctactccaaaatccggcccactgagtgtttgaacaagacatggcagaagaaggttggccccgatgagccagaaccatctcccaatgtcaaggccttgattcttcactcgaaccagcttactaactgggtcgctgaaatgattctcgctcaaggcgatgtcaagaagcgtgtggtggtcatcaaacactttgtgaacgtggctgatgtatgtattttctatatctatttgatcttgaccttactaactcgactatacagaaatgtcgcaacctgaacaattattctaccctgacatccatcatttcggctcttggaactgcacccattcatcgtctaggtaggacatggggccaggttagcggacgcacgtccgctgttttggaacagatgcgtcggcttatggctagtacgaagaactttggcgaatatcgagaaaccctacatctcgctaacccgccctgtattccattcttcggtatgcatcacaaccatttcaagcagaatgtcttggagcatctcacccctttgatttgactaacacatcgtaggtgtctatcttacagatttgaccttcattgaagacggtattccgtctctaacaccatcagaattgatcaacttcaataagcgggcaaagactgcagaagtcattcgggatatccagcaataccagaatgtgccttatcttttgcaacccgtcggcgaacttcaagattacattctcagtaacctccaaggtgctggcgatgtacacgacatgtacgaacgaagtctggaaatcgagcctagggagcgcgaggatgaaaagattgcaaggtatgctgaagcctcaagcagagacaagagctccttgttgtttgcatccaccgttgctgttttgcgataatcttgtttttttctttttcttaaaaactggcgtttggcatttgcccggcgatacccaaatttgacctattctcttttttttgggggccaagacaacgacaactctgctttcttttttttctttctctcaaaactgttcggctgttgagactaaccgttttggattctgaatctcgtagattactatctgagtccggcttcctgtaacccgtgaagatccctgtcgagttacatcccgcggcgccaccaaacaggttcgacaaatgcgccattcgcgctccaatcgacgttcgtgtttcaccacctcgtgaccgttcaggctatcctagtctccacaccacctcaccttttcacctctcagatctcacttttcagggatacttgcaggttgatctatcgcatgcatgtgaatgtctcaaagacccacacatgtgaacacttattctcgatgcagttacattcggtctcggcatttatcattgcaccggcgaatacggagtgctccgtatattgattctcgatatagcgcaatagagctgtttgattggttcggatttcttgtttattccccccttgtttccttctttcgtctcttatctccccgatgaggtcacctgcctctgtggccatctcgaactcacctcttctttgtaccgactgtgacatatcctggccattttctcggcgtattttgccttggatttcagtttcatttttttgtttcctttttcaacatatccccttgtgttgtcgccaggttagggcgacctgcttttttcttttcaggcctttttcctctacgctgtattctgaataatgaacgtcacgaatgactcgagacttttgttcctgtctgatcgatgttacccggtggagttgacttggtacttttaacttcattacatacagtgttctactacttgttcgattcccgcccggaatattgcgtattctgcgccaatagagattgattaccttggattgtcttagattcttaggctagcggatttactaccgtggacaccaccctcagacagggccagtatttgcctttgttgcccttgcttgagacggctacaaaaggtgagacatgaagtcgtaaattcattcatttgcaggaactgcaattttagatattctatgatcatggatcgagaaagatcgccgcacatagcaagccccgagaaattccagcgaatatggtgatatcaacccgctgagctccaaatacaacagttcaagctaagtaaaaagcgtggcagtcatgtcaatattttgggatcgtggacccctcatcatatgagctggatcactctgtcgaaggagtttggtttccgatgccgtgaaacagtttcatctttgtttcggatgctatgagacccttcacttcctccgcaacaacccgctgtccgccgcggacaaccttatccagctgttgatctttgctgttgacgccacccgccctcccgcccgggggcccccnnnnnnnnnnnnnnnnnnnnnnnnnnnnnnnnnnnnnnnnnnnnnnnnnnnnnnnnnnnnnnnnnnnnnnnnnnnnnnnnnnnnnnnnnnnnnnnnnnnnnnnnnnnnnnnnnnnnnnnnnnnnnnnnnnnnnnnnnnnnnnnnnnnnnnnnnnnnnnnnnnnnnnnnnnnnnnnnnnnnnnnnnnnnnnnnnnnnnnnnnnnnnnnnnnnnnnnnnnnnnnnnnnnnnnnnnnnnnnnnnnnnnnnnnnnnnnnnnnnnnnnnnnnnnnnnnnnnnnnnnnnnnnnnnnnnnnnnnnnnnnnnnnnnnnnnnnnnnnnnnnnnnnnnnnnnnnnnnnnnnnnnnnnnnnnnnnnnnnnnnnnnnnnnnnnnnnnnnncccccgcctcggggggggggtggcctccattccacgtgcggctttgcgcactttttgactgagatccatgatctgcttgttaccgaaatcacgagaggtgaatagcgggctctggctgagagtcgcgacccagtacttgttccatagaagggacaatatttccgtatcaagggtgcttttgaaatgactgacatcaagagagtagtattgattggcatgcgcaccgaagtcttctgccttcccgagcggaatagtctgatactcgtcatcctcatgagcctccttctgcggggtaaagttcgatggaaatgtgcggaaagcgccgatctcaacgcgacccgcggagatggtacggtccgggtcgatgacaacggcgacaaacggtccagtcatttgctgtgtttgttgagtggccacatcaatcccagacagccagcacccataacccggatgactgtgataccatccgacagcattctccatccgccccgagtctcgacacgactggagatatgataccatgtactcgtttgcctcgtcctgcgcattcactcgggtttcggtgccttcgactggcagccggaacgcatctgtcaccacgaaggtgttcggtaagatgtagccttgcatcagacccataatctctagtgagccacccgagcgggcatgcatcaccatcttcaatagtgccgaagcggagattcgcacgtgcttgaaatagtatgggtcggtggcccatggtcgctcctcgttgagggctttttctgtatcggcattgtattcgtagagggcatctcgttgaggatcaaacacgcttatcgcattttccagctctgtgcggggacattagttaattacaagctggctcatatcagtatggaggtactcaccccaggcctgctgggcagcctgcattttgggtggatgggatagagaagacagtcgaatggtaagcaatgtatcgcaaggatcagagtactttaaggcaaggactcgggtgataatgtgagttctgcaaggaccggagaataaatagtatcagggctgaatgcatgaagtagagaaggccgtggggttgttcattgattggcagtatcgggcggtggggcttgctgagtcagctgttgcccttgacgacggtctcacccaaaacaccacccacttacgccttacgaaacttgatgttatctatcatctgcgatctccgaacgcccccccccctctcataaacaacagtgttgttcgctttcctatgtggctgccctaagtgctttcgcaaacctccactttcgtttatttccgtcgcaccttgtgtgctgagaaccctgtgtgtcaggctctcctgttttgatcccgacattcatcaccctgtcgcagcttcgctcggcattgtatcgttcatacaatattttgttatcaacctcgacttttgtcatctccgttaagggactttcattacaatggcggtagataccagctacctgaccactcaggtcaacaacatcgtcgcccagctccatggtatttacgacgaaattggagttcctgcgcgggagcgcgagtctcgtgaagcagaggtaagcttgctctctgatataacaatggcattgtcgcgtggctaacagagtgatacagctcttcagcgccctgtcagagaccttgaacaatcatctgaaggttgttgatgagtgagtcgcatccatagacagacccattggaggcttgctaattatatttctagggagagagaagatatgacgcaagaagcggaacgtctcattacagctattcaacaaatggaatcgtccctgagcgatgaacgggccaatggccaatacgagcttaaccgcgacgaccttcgtgtcacttacccacttaacaaatgtattgcattcttacgcgagaagaacgactcgatgagcaagctgcatcgggaacgctttgagcaggttaagagtgagtcttatctgtgtggtgtgtcgctgatgctcctttactgacattcaatagaacttgtggacgcgcttgaatcatactcctctcacctcgagccatcatttgttaagctggaacttcctcctactgcaccagggtcctcgattcccccaagcttcgacctttctcctatgtatgtgaccgcattggatgccgaattcactcatgtctacgaagagtaccaccgccgcattgccaaagtccaatctgcctgtgaagaaatgatcaagctctgggccgagctcggaacgccccaggcgcaaacagattccactatcgtgaagtgttatcgcgattcccctgagcaactggggctacatgaagatgatgtcgccaacctaatttcgaagcgcaataaattggtggaagaaaagaaaagccgcgagcgcaagatcaacgacctcagagctaccgtaatctctctttgggatcgctttggtgtggaggaggcggatcgcaaggcattcctggctgcgaaccgtggctgcggtttgcgcataatcaacgacctcgaagaggagttgacacgcctcaacgaacttaagagacagaatctccacctctttgtggaggatgctcggtgccgattgcaggaattatgggacactcttttcttctccgaagaggaaatgctcgatttcacacctgcattctccgatgtgtgcagcgatgctttgcttgaggctcacgaggccgagattacacgactggaagctcttaaggaacagcgcgctcctactctcgaaatgattgacagacaccgcactcttttgacagatcgcgaggcacttgaaacatcaagccaagatgcatcccgcctcatgggccgcgggaacaagggagagaagcgtgatcctggaaagctcttgagggaggagaagatgcgcaagagaatcgccaaagaattgccaaaacttgaagctgacctacggaaggagttggaatattgggaagacgaattcggccgacccttcctagtgcacggagagcgatatcttgatttgttgacacctgtaaagtcaatgcttccaccacgctcaaagacaccatctgcaacaccctcagctaccaaagcaagcacaatgagacaaaacccacccgcccgccctgcaagctccatgagaggcctgcctcccccccgctcagccaccaagactcccactagcagcggcccagttaaacacaacaccattggctacggtgcctctagagccggtgccacctcaagagccggtgcaacatctccttcgaagcttcccgcccgtgtcccgctgggaaacatgccccttggaaccaactcccctgagcgtcgtatgcagcccggtgcctactcgtctggtacacttaatggaaagatgcagccccctcgcggacctcccccacggatgcgtgcgttgacgattgagtcaagggaagaccgattcagccaccttatggagccaccgcgctgcaatagcgccatgtctagtgcctatgtgcggcctgttagcccggaagacgtttatgatgaccggcagcgatctttcatgagcacttcgggattctccaactctcaaagatctactggattctcccattcatctcactcttcacactcgtcactgtctttgaactctagccaagtgttcccacgacctaacccttacctacaccacgcagctccaccgccagctgcccgccaagtctccaactcctctacagtcaacacaacaacctctggatctgaaaattgggagactttcgaggacggctcgggatcagaagccgatcccagtgacatttactattccaaactccgtgccgcaaacggagggaaacgatttgcacccgaggatggatcggatctcactggcaaaaagaccaagggtattcgcagtgtcagtccagaaggtccgcatcccgggcaggtcctgcgcgttgctggcagtgacaccgagtgggctgatgactacgaaacttattaggtgttctgccattgcttccctctccataatgcatcccacctcttgcacctcatttctcggcgccttggaagttcaacggtgttacgcaaccgttgacctttgatgatcccacgactgaattttgcatttgcacggttcatgataatccttggtttccctttcatgactgagcacccttagattccttatgggcaggtttctcctctctctacacacgctaattcccgaggggccgacattcaacttcttttcctgtccataattacgagtttatcatgtcaatcttgctcccgctctccttcatctcgatgatattgagcccaaccctgcgcctgactgtgtcaggctgcagccctctgaggattcctgtcattcacgcctttcccgactgacaccctcgctgtttcaattgccactgagtttaatcttttgctttttctggtcttcttggcatggtgttatctttaattcctttctctgtcacttattgttttcgttggcttggtgcttaaggctcgtttattcccttttcgatctccggttttgggagtcggattttgtccttggttttcaccgtttttctatgtatttgtcagcgaagtacgccgtacagtgttttgatatatctagtgttgttaattttatcttctggttgttcaaccttttgttcaattcgataaatagcatggatagatcggtgcataagccgagacacttgacttaattagggctacccatccacatgactccggtaactaggacgacttggattgcagcccgaacaacaaggcaagagataatatcgccgctcacaacggactccgtacggagtgagcggtgttagcggtattcgtcattaggccaccgtcaaacaagcccctggtcctttgggctcagtttcatccctcaaattcaaattcaccagaagttgttccaccacagtagctgtcatggcaccgactgtggttggtgacacatgtgacagcctttttgggcctgtgatcagtcaacatgattgtcgtggagggttcgactttacaggtacatatctccaatgtctgggcgcctgggcagtctccacatatactgacatggaagcaagttctattcgaagcatggatattcaacattaccccagcagtctgttttctcctgctgttacccattcgcctgttccagctatctagagagtctttgaaagtaaaatcctcgttgactcattgggcgacgctggtaagtcttgctatcacttgtcggaccttgaaacgtctaaataatgctctatacaggctattgcggtagtattgtccggaattcatgtcgttctgcttgtgtttagtgcgacgcagcactaccccgcacaaaatgtgtcagttgcgggtgctaccctcagccttatagcggcaatttctattgttgttctgcttcatttagagcacagccgggctgttcgaccctccttccttgtctctgcgtatctgcttattacggtgcttctagacattgcgcgagtacgcaccgcctggctgttgccatatggtagagcatacccgacctgcctcaccgcatctctggccaccaaattgctcctcctggtgctggcaaatatcgaaaaacgcaaatggctgttgctatccgaacagtctaccgagagaactagcggtatctttaacaggggtttattcgcctggctcaatgaattactgagaaaaggacacacctcgttgctcaccagcgatacgctacctaacatccatgagaagctatcgtctagtgatttagccgaccgattttcgaaatcatgggcgctgtgcgaccagagtcgtcagcatgcgttgctgctggccgtcgttaactgccttcgctgggatattgctgctattgctcttcctcgactcgccttgataggatttagcatagcgcagccattcctggttggcaagaccgttacattcctcgagcaaactgaatcctcgatgaatattggctatgggttgataggagccaccgcgattgtctttatcgggattgctgtaagccttatgtcttcaaccacttatcccactatccgatggtcattggccgactgagtttatgacttaggtcactacggcatcttatgagcacctaggatttcgtgctacgaccatggtgcgtggtggccttatggctcttgtctatcagcacatgatggagctgccactggggagcaccgatgagtctagtgccatgtcccttatgggagctgacgttgaaatgcttgcggagtactttcactctacagtgtgcgaatcttgggctagtatcctacagctgggactggccgcgtggatccttcaaactcagatcggtgttgtttgtatcacacccattctaattgcaacaggtactttctctttctctacctatttgcacgagatgtgatgaccataagaaattaacagattgactagcttttaccgttgcttcttttgccacgggcaatgctgtgtccgttcggcagaagacatggctacaagccaccgagaaacgcattaatttcaccagccacgtcctcggctcaataaaaaacgtgaaattcttaggactaacagagatcataaagaaatccattgaaggcttaaggattgaggagcttgagatctccaagaagttccgccgaatccaaaccgtccgtgtctgcatgagtacgtatacttggaagtccatctacggatagttttattgaaaatatcaggatcaactgaccagtctattcagtaaatcttccggtgattattgcgcagtttgccactttcgcgacctatgctgtagttgcgaaggtgcaagggtcggagggtctttcggtctcacaagctaccacggccctttcactaataaatctgctaatcactcctctcatgcatctattgttggcagttccagatgcattcgcatcaatgggatgtctgtatcgagtccaggacttcttgaaacgtccaaatattgtcggtgagtagcgctaatactcccatacgtgctactcagtaagacgtacagcgaattaacctcatttacgcacagaaagaaggaaattgctccagtcagaagcagaagctctgaatttacctactaattcattcgaattcgaactttctaactatcccggggctaggggaatttcctcgccagagaatccatctgacgtgctgatctccctgcaaaatgcctggtttggctggaatgacccttcttcggatagtgctggtatcacactcaatctgagcccctcgcagctgggtaccctagttgcaattgtcggtcctgtgggaagcggaaagtccacgtttctcaaaggcctcgcaaatgagacgtccattctcaatggtgacgccttcatcaagtacccagatctagctttttgtgagcaaactccatggctaaccaatacgacgatccgggaaaacatcattggggagaatggatccgcggcatttgattctgattggtattcgaccgtggtgaacgcatgtgcgctagattccgaccttaaaaaaatgccagcgggcgatgagtcgttcgtcggtagcaaaggatctaagcttagcggagggcaaaagcaaagaatcgtgagtacaaaccatctttccctctatatgggcggtccggcccggggataatagcaatggatttgtgaactgattttattataggccatagcacgagctgtctatgctcgcaagcgcatcgcgtgcttcgatgatactcttagtgctcttgataattcaaccgctcggctggtatttaacaatgtctttggcccgtccggactgctgcgtcgactgggctgtactgtatttctcgcgactcacaatggtgcgctcctcaaccctcgatatctttatcttgtcacttgtgtggtatatactgactattagcagttcaatatctaccccaggccgactttatagtcgtactcggagagaacggcaatatttcggaacagggcaccttctctcagcttctcagtcacgccgggggatatattaaccggctaggtattcaaccagaacagattgagaaagaaaagatgcaagatgacattccaactgggcttctagagactagtgaagtcataacaagccgcctatccaccccggcctctatcgatgaatgccgacagacgactgatattgctgtttacaagtactatttatctgctatgggctggttccgagtctttgtgctgagtttcttactggtggtgaatggtggtattggtggattacgaagtatgccaaaattctcgactaataacaatgctgtatgatgcttatctttgcataggtgcttggattgagatctggtcctctagcaccgacagcgcttcaagctcgggattaggctactggcttggagtatatgggacattgtccttcgtcgaagccacttcaatggttcttgcggtatagtaagtgaaaaaaaaaaaaattcggttaaagcttccatgctgattgggttctatctaagttggacctgggtcgtcattgtaccggccgcgtcgaaaaatgttcatgctactgtgctgcaaacttgcatgaggtgaaattccagttcttcactaatctaaatatcggccaactaacatattcagtgcccccttgtccttcctatctcacgtagacacgggctctctcatcacccgttttagccaagatatgaggctagtggacatgatcctcccccgaggttttatcacgacaggattccgtaagtgcattcattatacatttatttaacgtgtttctctaacccgagagatatgaagaactctttacggtgctttcacaggccgcaatcgccctagctgcattgccatatctggctgtagcccttcccttcctagttgggatgttagtgctagtccagcgcttttacctgcgtacatctcgccagcttcgactgctagagtatgtttatctgtgccaacaacgctttaatttgatcagcatgcttgtgccttttagcaaactgacaaacccttaggatcgagctcaaaagccccctgtacacccatttcattgaatctctcgctggtgtagttaccatccgtgccttttcatggactactgcttctacgtccaaaatgttgtacttacttgatagggcgcaaaggcccttctatcttctattgtgtattcagcaatggctgggcctggtactgaagctcatggtgactggtatgacgcttattctcctcggagctgctatagctctgcgcggacaagtgagccccggtttgttaggtattgcgctgattggaatgatggacctgggggaagtactctcatacttgatccagaactggacgcttctggaaacctctttgggtgcgattgccaggattaaggatttctcggaagatactccaagtgaggaacaagatgcagtctatgagcagccaccagacgcaaaatggccaagtcggggtgacatctcattcgttggcgcagatattgcatatgagtctgagaacgcagagcccgtgttgcacggtatctgtctggatattcgtgctggggaaaaagttggactgtgtggtaggaccggaaggtgaggaaagacacttcagtaggggggagaataggctgactctcttatagtggcaagagcactctggctctatcattactccgtcttaacgaggtggtttctggccaggttcttatcgatgaggtagacatatcgacggtgcctcggtcattgattcggcaccggatcagctctcttagccaagaagccttccttttcccaggtactattcggcagaatgtcgatcctttaggcattgccagcgatatcgatattattgaagctctcaaatgcgtcgaaatctggaatgctcttatgtctgcgacgaacagcgacgcccacagcggagggttgctagatgtaatactgactgacacgactttgtccgaaggccaaaaacagctattttgcctggctagggcgcttctcaagaagagtaatattctcatactagacgaaccgacaagcaggtatgtaatttctgtctttttgcttctggcaacacatgattatgcgagcaatgccaaccattcacaatcaagtctggatgcagagacagatgccagggttcagaaagtcattcgccaggagtttcagagctgcactatcattatggttgcgcatagagttcataccatgctcgactttgaccgagttgttgttctggatagtggtcgaatcatagaagagggacatccttcggacttgttgaacaaggaaggcgctttctcaagtctgcatcatctggagcagtcaacaggaagcaatcaggagctctgattgatgggtctcatcaagttgttcacaaagacttacagcttttagaccgcaatacactttgtttttccgctctatatcagtagacaaatcatagctctggggatcagggcatctgctctttatagagttatttaccgcaacggacaacctgctaagcaagtgattgaaggcatcaatgtcttgtcttcagcaaaaatattggaattgggtcatatcggatacagctatagtacagtcactcaacctcttaattctacattaccggctagtcgcaagagtccccatccaactctgatcttcaggcaaagttcccttaggaactctctggccagcagaaggaacaagggactgtgtcaacgccttggcgtcctgcactcggcgaagtgtctcatctctcccaagaactaccatagtctctgagattccaggcccaggcgcagaagccaacagcgcccagcggaggtagtgatacagctccttcttgaatatcttccctgcgttcttcgagccaacgggtgtctctggctcagacgtggggaaaacaacgctttccgcgccttcatagctgttaatgttgtcgcggtgagtgtcgatattccaggccgcggatgggacaagggttaaggcggctgctgcagtgtgcagcgcttggattgggacttctggggaggattggggtgaggccggtttgtaaggagctctgtccagtttgggggtaaagaagttagagttacgctgggcgaactcctttgcgtttgtgtagttgttgacatctgcgcggatgaggggcgcgatgtattcggagagagtgcgaccgttgaggatcgtggtgctgctaggtgtcagctattaggtactatgtaatacacgcgtgaattctttacggctggtggctgacttacagtttgtcgagagggtagctttcttccacgaccaagctcaccttcttcaccatctcgtcgaactcaggtccgccgcttttgaccaagcgttggacatgtgccttctggaggaactggagtttttcaaaggagacaaccgtatttcctcgagtaattttcaaattgaactggtatcaatattagcagggaggttggcgtgttttcgggggactaagaagaacatacaatctgttccagtttcttcagacttaacacatcagacttctcggaatgcgaccagcctagaagtgaagtgaagttcaccaaggtggatgggaggatcccttgcttgtccttgaatgacgagaggtcgatatctgcgttgcgcttgctgagcttttgcccacttttgtcgacgagcaaagggacatgagcaaagcttggtggcgtccatttgaaggcattatatagcgccatgtgcataggtgtcgatgacatccattcctgatagacgttagttcagtatcttgtgacttgatagctacagatataataagtaaactcaccgtccctcggataacatgggtgatcttcatgcaatgatcatccacaacatttgccaagtgatacgtggggtgtccatccgatttgataaggactgggtcattgtaaacacggtcgatgaaatccagcttcgagttgttctggtgattctggccggatttgccataaaccagatcattgaacatggggtattcctctacttttagtcgaataatgtgtgcctctcccttggctgctcgatcttctgattcttcggcagatacgtcgccgcatttccggtcatagccaggcggcagtcctgcctcgctgcggtgacgggcgatcgaatccaatcgttctgcggagcagaagcatcggtatgcatggccattggcaacaagatcattggcatgggactgatacaaagcggttcgttcggactgcatgggagcaaatattagagattaatttcttgcgacaaaggagtgatgcctcacttgtctataaggtccatagggtccaccaacgatgggacctgtcaacgaaacgagagtcagcaatttccctccatttttagataagtttcaaactgaccttcatcccagttcaatccggcccattggagatcatcatagagtcgctgttccgccccgggaattgtccgtttctaccgtaatcagtcgtagtccacgcaacggagcgcaatccacgaacctggtccgtatcctcaatgcgcaacagaaattgaccaccggtccgcttggccagtaaatagttgaagagagctgtccgtagggagcctagatggaggtatccggtgggcgagggcgcaaaccgcgtgcgcgcagggccattcggcagtttgttcttcaaattaggtgcttgagcagccggagaagaggagaaggctctacattggatgatccaagatcgcctggcgagtagcccttggggacatctcattgcgaaatagaggaatggccgatctttctgatatgttgtggagttgcggagttgcggcgcggagctcccgaacaaaatttctcaacttctttggatcaacaactcccgctctcacttctcgttcaccaacctctctcttttactattgggctcaagtcaacggtctttttctattgaagaaaattccgatcgtgttttctacaaaataatcactgaaaagtacgttggaaagttgtgtgtcacttgagactctactaacaatgttctcagtggctgcggttgaagttgacctctacggtgtgtgctcatttgcgcagatcaaccatacaggaataccatattaatcagttattcattcatacagaggtcctagagatccatgaaagctcaactaaagatgatatccgcaaggcataccgcaaggcaagacgaacccgatcgtctccggattccagcgatactgacagccggctttccaataggcagctttggccaaccaccccgacaaggtccccgaatccgagcgcgaggaagcttcaatccggtttaaggctgtgcaagaggcctatgatattctttacgacgatgacaagcgacacctctacaacacacacggcatgtctgccttcaacggctcgggtgagccgggaatggcaggacaacctgacctagatgacttgctggcacagatgttcggcggcggcatgggcggtatgggtggtatgggcgggatgcctggcatgggaggaatgggaggaatgcccggtggtcgccccaacaaaccgcgcaagagccccagcgaagaacaagattacgaagtcaacctggaggatttgtacaagggcaagacagtaaggttttccagcgtcaagaacgtcatttgcggacattgcaagggcaagggtggcaaggaaaaggccactgccaaaaagtgctcgacttgcggtggccagggctacaaggaggtcttgcagcgcatgggccagttcgtgacccagcagacggttatctgtaccacatgtaacggagagggctcatatttcgccccgaaggataagtgtaagaagtgcaagggcacgaaaacaaccgaggcgaagaagatcttggagatctacatcccccgaggcgctaggtaagatggcctttttttctatctaacggaatcacatgcttactgtgctctaggcaaggagaccggattgttttggaaggcgaggccgaccaagtgcccgatcaagagcccggcgacattgttttcaaagtcgtcgaggaagaacaccccgtgtttacacgagccggttcagatctgcgtgcaactattgaaatcactcttgctgaatccttgaccgggttctcccgcgtcgtgatcaagcacctcgatggccgtggcattgagctcactcaccccctcaccgccggcgctatcctctcacccggacaggtcctcaaggttcccggagagggaatgccgatgaagcgtgtcgattcccgtggtgacctgtacttggttgttgatgtcaagttccccgataacgggtggaagcccacctcagagatgctggagaagctcaaggagattctccccaaacccagcgctcctatcaaggccgacaccgtggacgaagttgaatacgaccccaagggtcagatcgaggacttcggtgcgcaggatggccaggacgcagcaggatgggaagacgaggaagacgacgatgaaccggcgcagtgcgcaactcagtagaattcttgcatagatggcgtctgggggtttgaattaatggggacttgtgaatagaacaaccctcttggcttaaaaacaaaaatacattgtataccaatgtaatcgtctttgcagccccacccgcgttcacgggctgcgtctattttcattattatacatagttcgaaggttagttaagagataccaggttattgaaatatcatcaccaggtaccttttgtatgcgtgtaccatataaaagatacctaatgtgtgtacctataataatgaaacagccgggtgaggatggaagacgattacatcgacgtacaatatagggaatacggaaccagttccgctcattttatgagtggacaggtggatggaccttgtacatattattcagatctatttatgtactcgtcggttttgttttgtttttttttacaaatgagatattcaacttatcccgaggccacggaaagaatccggggtcggactccgcggtcgcgatgtcggactggggtcggcctaacacctttcggcttcgatatcggctgctctttctttctttaacttggattcccccctctacataccacccactccaggcctagaaagctcacttccaatagtatatagtcgccctaatgaattagtctgtaatggaaaaacggaaagaaaaacacatggcaagtacacctgaattgacggattttccgagtgtgtaccgaggctatggtaaaagatgccggattcgtcgcgacgatctcaaggttcggggtaggttccctgtgtccgagaaaagcaccccgtggcaggagatcttccagagcgagactggtcggttgaatgagattatggttctgtctgcttgacgccgctaagtctgcacgatgctgtcgatcctacacgatgctgctgagtatgttgcgccgttggaagcctcgatgtaaacaattgaggttcaaactggttattgtggggaaaacaagcggctgtggggaaatgaactatggtaaatgcgggataacgaacagcgctattccgcgtgttgggattgtataccatccccacttgagatgatagtagctgctgccagggacgcactgtccaatcacctaagtgcattgggggcattggaagaagaggaggcaaccgcccgtatcggcgaaagcgaatatccaattcgccggctatagacgggtccagcccctttgccgagtcacttccccgggccggggtccgccacactttcctggttggatctagtggtaaccttatttctccgtggatataattcctgaactcgggggagactggtaatgccaacgttaaatagaaactgagtccctagagtctctagatatctaatagtaatggggctaataaggatatctcaaagggctctgatatagaatatagcactgtagaggcgatgggaagtatgtgtcttcttcttgattggccaagccttgttcttaattgggtaactcaattttccaagtctcccccagctttttacgggtctcttcaaactgtgacccgatcatttgtccttcgacgtccatataggccaggtggatgcagttgatggaccaaacagggacgtcacctcttcacgatcctccgaatgtcggaaattgaagagaatggggacgatggatccggggtacgcatttccgattttccagacccaattggaactaagacgatatatgattacttggtcgtatgcgggggtcgcggggtgtctgtgctctccagggctgtctctagggttataaaatctaatccttgtcccaacacctttttctctaccttcatactctggaaggaagaactgaacacagtccggactgcaaaatgggcatattcaagaatagccgggtctatgtactcgccacagtggcatatacgggttcattcctattcggtaagacaaatctctaccattgccgatcagatgcagcatgctgataagtttcccgaaaaggatatgacacaggtgtgatgggaagcgtgctggaacttccaagtttcaaggccgattttggactcacaactggaggttctggtttttcgactgccaatgccgaagtctcatcgaatgtcgtttcccttctcactgccgggtgtttctttggtgctatcttcggcgctatagccaacgaacggtttggccgtcggtattccatcatgggattcctgacattcttccttatcggtgctgctgtccaaaccgccgctaccggcacgctagcctatatgtatgccggccgggtgattgcaggtttcggagtcggaggaatgtcagctatcaccccaatcttcgtgtctgagaactgcccaccggccattcgtggtcgtattgctggtctcttccaggagttcctcgtcattggtatcactgtcgcatactggctttgctatggcgtggcagagaccctccccgccacaaccagacagtggcgcatccctattgcattccagcttgtgcccggtggtctaatgatgattggcatgttctttttgaccgaatctcctcgctggttagcgaaagaaaatcgtctcgaggaagccatcgaagcccttgcatatatgcgctctgagccggtcacaagccttgtggtccagactgagatggcggaaatcaaagcggccgtcgaacacgaagtcgaatcaacacagggcctcacttggcgagaagcattcctacctggcaaccgtcttcgctttatcaactgtttcttgattatgttctggcagcagtggacgggcaccaacagcatcgggtactatgccccccagctgttccagacaattggagtcaccggcggtaacacgagtttgttcacaacgggtatctatggtattgtcaaggtgatatccactggaatcttcctcatcgttggtatcgacaaggtcggtcggcggtggtctcttattgctggcgctatttggatgtgcacaatgatgttcatcctgggtggtgttctggtgacctatcctccggatcctagcggtaacggtactctttcgtctgcatcgctcgccatgattgtcatgatttacctctacgtcattggctattccgcatcgtggggaccgattccatgggtttacatttctgaaatcttcccaactcgccttcgttcctacggtgttggttgcggatcggcaactcaatggctcttcaactttgtggtgacttatgtgactccctccgcaattggcaaccttggctggcgaaccttcatcatgtttggttgcttctgctttatcatggctatttgggttttcctcgtcgtcagggaaacgaagggtcgctctcttgaggagatggatgttctctttgagaagttccatgcccttggccgtttgcctgatattgaaattgcacaggaaagaaagctttcgtttgatggtgctgctacctcggttcataatgaagtacagggtgttgagaaagaggattatgtgaagacataaagagtgtacagggcatgtttgtgatggtctgatacctgtttatgtatatagttgttttatggagtccaattctacgtctatttggttatgtgtgtgcataaacctagtcaattacctgtgtatattgatcgaaatcagaactggtcggcggaaaatatatcctctcagggtgcacgaacatctcgactagggtttacaagaaccttcagatgcgctcttacaacatatatctccaagaaggacaatagaagactcaacctatcgaaagttagacagaggtagctacgaggaataaatttcgcaggagatgatggattcaaatatttatccgtcacattcataatgtttaatccatgagagatggaaatgtttctctttcctttcctcatacttgctacctatcaatcaaaaatccttgactattggtaaactactatataaaggaaattgcattcgaaatttacgaataggaaatgttttctgttttgtttcgtgttattgctgttctctccggccgttcggggcagcattataaaagctcgtcaatcatctattccctaattccagagtcgaagccgttgattctctcaataacatattttatatcaaatttatatatagaaaagtatttagttgttgaggatcagatgagaaacaaacctcacggatgaatcaaaattacctaatcactgatatgccgaggtccgtgtggagagcatgttatatcaaggttcaagcataaacacatacacagatattgtagaatcacgcttgaaccaaatcaaaccatcccatcaggaaaataaaatggccaccgcagagtccaaagctaggaggcaacgcaagcgcagcgactatggcttccaccaagtacaccagacccgatggtcagtaccagaaccaccgaactagcagccacgaaagacaccgacactaacacccacaggttcgacaacgacatgtacgcacacctcaataacgcagtgtatacgcacctcttcgacacaattgcgaacacgtatttaatccaacactgcgggatggaccccttcagcgtgaacaacccaaccccagcgccgactcacggccagccctccaatttcccctcgccatcgaacctagaaagcaacgccaaccaaatcggcctgattgtctcgacacaggctgatttctttggctccgtgcgcttcccggatctgctggtggtcgggctgcgcgttaataagcttagcaagtctagcgttacctgggaagtgggtattttccgtgagggtgaggaggatgtgaagatggttggaacttatacgcacgtttttgtgttgagggagactatgcgggttgggaagacggggatggaggagcggactagacggggcttggagaagttgcttgttagggaccaggcgaagttgtgagggggttagaatgtcaatattggccgctgggctgggcttgtacatagttttcttatcggaatataggtagccccttgcattccagggcagtcgtctgattgtctggttatagatagggattctaacttgagattgatcaaatggtccctataggaattcgagattcgagagaaaataagcgagatatagcaagacaccttatcttgatttgtatggtattttgtcttaggaatgtgagacgccgtgaagaaaagacaaaaacgtgccccgtgtagatcaagtagatcatccaaaaaaccctagatcattaaaagtctaatctaacctgaaatctatgagccaaaagaaaacccgaaaacatatccgtcgccgtgaccaaaaaccggaaccaaagacttttgtggttatcatgagaataaaagagacacgctaaatcgcttcgcaatatcaaaacaacagaatggtaatacaagtatgatgaaagctcaatcataagaaggattgtcatctgacaacctcaagagttgtgggtgagacaaggtgctcattcaaatttgccagcaatgatgctgctgcaacgggacacgctgacactgctcggaggcgaggcgccgcggcggatggtgtatccatcttcatcgagccaccacttggggtaagggccaagaatgaagttgccctgagcatcccagccagcgacccattgaatgccgtcgtcaaggaggaaaaagcgaagcttttcgggacggccgcccttgtgcagcggggcgtcgaaccagcggcagcgctcctccagttcggattcaaacatgtaacggtggaggatgcgacagtagactagtgcagcagggactttttcatcgttttcgcacccatcccgatggatgaggtgccatccgcgacctttgaggaacttgtatgttcccgggacgggggaatcccagtgttgttctttgagattgctgtcacggtcgcccttctggaaccagtaggtagggcagaagatggtgcgcgcacagaggaagaggttgggtgccatgattgaggatggtatcaatgaagaaaaaaggttatgtgcaaggataacttgtccacgaaaatcgggggaggagtccaagttgatatagaaacagcactggtgtacaaggaatctgaagggctagatcgggctataagtcgacagccatggtgaaaaaaataataaaatatcaatcgggtcgaaatccaagttgagataggaatttgacgggtcttccgcgttcacgggagcttggtcaaggaccgagaagaactttttcaggagacaaagaatgcagaagggcacacttggcacggggttgtgatccgaggcaaggactggttgggaatgtccagttcaaacagcactggccagacagtaaggtgtattccgttatcgatgcggtgagcaggggttggagtgttttaagtcgggaaaaggggtcgtgataagcttgtagctttacacgacggaacagcctttgtgataggaaattgaggagggagggtggaaggcgaatagggagagttcaacagagcttggacgtgcagcaatcggcaacacgcagtagcacgcacaacgggtgttagagctcaaccagagcgtgtgctagagatagggcatttaactggaggaatgtcgccatggtgatgtgaggaagatatatataaaaagggaaaatacgaaaatccagaaatccggaatgtgtgtttggatatatttggcggtcagatgtgtaacagggaaaaagtcaatcgacccgctggacagccacaactggcctgccccgagacaccgggatttttccgggctgacccgcacagccttgagtggctgaaaatggctgaaatggctgaaatggctgacatccggtggattagctaacccgctgacctcagagattttcacgtgcggggactagccgaggcttggcaatcccatcgtttggcccggggatttttctccgtctcccctggttatcctctttagggccgatccttttcctttgctccgtacggcgtacaccgtcatggcctccccaataatcgttatggaccgttctgactcaatattataatcaataatgccctcgaacacttggcatgcattcctaacgggaaacttccaggctgcagaattcttcgtggcgcagttctcggcctcagccctatactactccgtatgtttctcggcattttaaggctggccgagtttattctggtctggactatttgatgccgatggtcttggtttttcattccccagggaagcgttccacgaccttcgattgaaagattagcctggctatgatcagcataactgttatggtgtgatgactgcatgccgcaccttttactcatcattatctaggcctgagacatccctgtccctgtccatgtgcatgcataatcacaattctgacttgacttgtcaacaaaccagaaatcatggctctgccacctggtcgagagcctcgcagctacaggcgatcgccaagcaaatccttgccaattttgcaatatgacacgacgcacggcgttaacgataagaaatcctttaataataattggagagaacaaaatcgacagtttgaatttctttgatatctgaaccctaatctttctttctttttcatgtcctcgggccccttgtgtgttggccttctttcaaactgccaaggtgagatgattttctctcatccacatcatttgcagtccctcgggccttttcgggtttcatgttccgtacccgggccaagcttactcggggctcatcaagttgagtacacaacataggtagtctaaagagggtttctaaaccaggacactggggaaataagggatacttagccagaataactgcaacatactacatacgtactcaataaaacaacggtctttacttgctcagtattacttccacggccaaccctaaataatgtacggacttgagataatgtgctgcaaataggtgctgtgatgagcacatatagtagaacattatgcgtccgttgtacccgatgtcaacgagatgacgtgaggaatgactcgactaaaagacaggagtcgtggatcttgctattaatttcaacacacgtcgagtacctccactcccgggatcaaggcttggatatatttacgttatgtacaatatgcctacatagcggtcgcccacgatataaaccaaggactaagacaagctctaagacataggaatactaagtcgtgtgagccccaattccactactccgtaccccgtatgtactcccatcttacccctttccttccaaaggcttacctccttccctctaagcggcatttctccacccaggcccaactcgtccacgccaacccaccacctccacaccagtggcgccaccaatccattctggcagctcgttgaggtcatcgacgttgtgggctatgcgtcaactggagcggaaaatcggcctagcaccaccgcaccgcaccgttacgtattacggaaaacgcgtcgagctggcccatcacggcgtccacgcgctgtacaacaaccccgacatgcatacatgatacgatgtggatgtctagcaagatggatggatatgaggactacgccggcgtaaagcatgttcggaacctgttggttggcatgtctcagttaagtgtcactcctgtctgcgatcatgcgatggatccctgcatccacatgtcgacagccagggacgctgcggcgccaaaagtaccctgtctgcattcagggcttgggtgatcccccggctttgatgccgctcatcggcggcgaagagctaaatataatcagtcgcgacgtcctgctgtctggacttggcgtctgcccccgagtaccttgataaagggatgcgctggctttatacgtcttggcgatatatagtgtacatcgagggacccggacccaagagttttcggtttttctcagtcttcccttcactccacaatctctcccccctattaacgactaagcagagagagagagagagagagagagagagagagagagagagtcacctctcgggtttgatcctcctgtcatgactcgatgttggtcctcgaaaattattcagatgtggaagacatggttgtctaggacgagaagcattctttatgttgtgcctgcggctgggggattcatggggcgaagatcattgcccttgttgtagaatactgatgggacagtgttctaaggccttgtttgtcattattagttatacagcccgagatagttttgtttggatagaactaaactactatcgctccgactgtcagctggatatcgccggatatttacataagaataatcaactcggtatctttgactcggctcaaccggcatgacaaactgcaagtgttgaatgatcgtaataggaccactcggattttgccgataaatagctcaagtgtctcgagcaaggaataggcggcctccgttggacttccgcacctgaaatatgcgccaaccgtgtgggacatcgctatcatttgctccttccgttcggattcgtagacaagcttttactaaggtttacgtggatcctcggtgacacgacggctggcgtcggcggccaatgacagagctcgtacgatgacgaagctttcctttccggtgggaaatgggtcgacgttacatcggggcggactgataactcgctgcttactactccgtattggacagactgttgatagtctatcgtagtggttggcacgcaatagcactatctcctgtcgacaatgggattgtctgtcctgtatatgaagatgatattgtccatagagactcccacttttgccctgcatctctatctgggctttgaccaatcatatacgtctgttaatattggccgattactatcatggcaggcaatatcttcggcgccaacgcgggtgctgcaaccgacgctcatctgcacgagaaagaaaaaatggacaccaatgaccctgccgtctcgatttctcgcgagcccccgtctgaaatttccgatggcaatcgttcgatctacttggattctagcatcaccttcgagaactatgtctactgggctaagcggtcgcgcgagattgaaaagcacatctcgactgacgatgtgggatttgcgcacttgagcaacaagctttttcgtaaaaaaaagtcggatgctctagtgataatgcagggagagattgaggaacaggatgcctccgtcatgaaggagtccagcaaacctaccaacacaatgaacggcgctagcacaagtgacaattggggcatcacggagacagaatgggaacaggcacagcgggccgcgcgaactgcaacatggggttcgatcttctatctcatttccacggacatccttggaccgaccaatgtcccctgggcaatcagtcagatgggcttcggaccgggagctgtactttacactgttttcggcgccatggcttgttattccggcttgcaactgtggaggatcttcatcggtcttgactcgactcgattcccgatgcgcaattatggcgatatggctttccgtatctacggagactgggcgcgcatttttgtgaacgtcctccaaagcttccagttcttcctcaatgtggccctgcttattgtaagcaacggacaagggctggcgcagatggctgtcggtgccaatggcaatggattcctttgtttcatcgctgctgaggtgatcttcatggccatcggctttttgctcgggcagatccgtaccctgcaacgcctttcttacttggccaacattgcggtctggctgaatgtcattgtcatcatcatgaccatggttgtggttcatgagtatccccctaactactcagcctcgctgactagctatgggacccaaaagggacccgtgcagacaagcgggtactggcctgcgagctcaaccctcaacgacaaagtcaatgctatgatgaacgcggttttcgcgtacggcggtgcaaccctcttcaatgagctcatggctgagatgagacggccctatgacttctggaagggctttatcattgccgagatattcatctacgtttgctaccttgtctcgggtatggttgtgtatagtgcgcagggccaatttacattcaatcctgcataccagggtaagtcgcatagcttccactgtagatcttgagattgctaacaaccacgcaacaggtattccaaactctgcctacaggttccagactttaggcaacgccatctcatttatcaccggcgtcatcgcagcactgctctatggcaacattggtatcaaagtcttctactccgcagttttccgcgacgtcttccgtttcccagaattaaacagccgaactggcaagtgggtgtggattggtctcggtaagctcagatatgcatcccctctatctgtgcacgcattgataatccctctagtgcctgcctactgggctcttgcctgggtggttgccgccgcaatcccgcaaatcaccaatctaacatccttcgtgggagccgcctgcatcttgcagttttcttacacgttcccaccaatgttgctggttgggttcaacgtccagaatgatgcgatactgcctgatgagatcaattcgacaaccggccaggtgcagcgcatagacagcggaatcaagagatggattagaggttacaagaagaagtttgtgtggaacacttttgatgtaatctactcgcttcttgctttgtctgccgctggtctgggaatttgggcttcggtcacttccatgcacaccagtttcgaggagggtaagctgacccatttcacttgtgcgaacccggctggatagatcaggtagaaggcaaggatggaggaacatcaatcctacaagtacggagtagttaatgatagacttcatattaaatcaagacttcatccattcctcactatggaccaaactcgagggattttgttcgagttaccccgagattgtaggaacgatgcgaatactgggtgatactcctaatagtattcttgatccgaaaaattatttagaatcaatatgtccatttacctggaaggtacaggacggcctccatcagtacggtagggggggggggtcgcattggccaaagtggggtcgctggtataatctcatactcctgaatgagagatatggagaaaagttccttacggaattatgaagttgtctcgatgcaatcttggccgagcggtttaaggcgccagacttaagtgaacactaactagtttagtgtgcgttctggtcacgaaagtggcgtgggttcgaaccccacaggttgcatacatttttttatactctcaaatattactatatttggtatatggcgttggtaggggacaggcaactgtactttccactgactataacaaccactaattttagtgagcgttctggtcagaaccaattatgttgtacgagcttatgtacgtcaggactttgtcctggcacacttttaccgcctttttatctgatggagctccaagtcctggtaactaatcttgcaactactataaaacaagtgaacaccaagactaggagtttatcagattgatgttgagtattatgatgacaacgagaaactaacaatacgttgaaagtggactataaaaaaagaaatgcaacctgtgggaatcgaacccacgccactttcgtgactagaatgctcactgaaacagtgaaagatgtaatctcttgagtctagcgccttaaccgctcggccaaagttgcgaaatcgatatttttagaatcgatatagtgttttttgaaccggatatccgtgaatgttcctacaggcaaaaatcgccgcgacaccaacaaacgctccttgacggcggcgcgagtaatacttatctcgccccgtcattaagaagttgaactgtttcataaagccaggttcccgttcttagtcaccgttgccaacgatgaaggtactatgacaggctattcgtactattatacaggaagcctgggaggcagtgccagaaagcaaagcgagggtatgcctcgaagaacgcaagacattattacagacaatggcggggcaccaattggtaggtggtatgaaatgggacatcttgtgtctcacagtatcctgcctaccgaaatctctagcagagtatcaagccaaagtttcatatagatagcgatgcggactatgtactagaagtggtatgctatacgggatttgatagattgcatatatcactataaaacttcgaaatagaacttcgaaaagcagcaaatctatatgctagggatgaaaccaaaaatcaatgcatcgagatgtcatggaagaccaagaccaaaacgctatgctcgtgaatttttcatggcaggtcagcagagtggtatcatgaagacaaagacaaagacatccggagaaatatgatatatagagaaggtattttcaagaaaggaaccctaaaagacaagatcattagttcgtagccgcagcagcctccgtggcttcgccgagagacacgttcattcctgcggcctcggagagattaaccagaccaacgccttccaaaagcacagagccagtctttgagtctgcggcaaagtcatcatcacccaaaccagccgggatagtcccatttccaatgacaacttcctcgccttcagcagcaggaacccagtccggacactcgcggggaccgtccatgcccgcaggaggcaagccccagcgaggcatagggctgcggtaagcccaatcaccatcgcggtcggcatacgcaacagcatgcaagaagatacccagctcatgagggcccgggtccgagtacagctcagtgccacagacttcacagagatttccggacagacgctcgcccttgcgcttttcatagtcctcagctgcggccacctgctcgcggtgcatgatctcgttgacaagcaccgggtcggtgcccggcgggacattcggcgccgcggtcaggtgtgtgcggtacgagaccgtgtcggggatttccgtcttacccatgagagataaccgcgcgacgatctcttcatcgcgctctgcggtcacctcggctttaccaagctcaggcccgaacacacggcggttggagtagatagggtcgttggtgatcggatggcctaagaactggaggtggacacggatttggtgagtacggcctgtcagcgggaaacagtgcacgatactgtagccctcggactcattggcgaatgccgggactggagtagcgggacgctgctcgtcgctagacgattctgtctcctttgctgcctcgggagggtagtaagccaagcgacggaacttggttgtcgcttctttaccggtggcgcgcacacggttgagacccagcttcgggctcacctgcatgattggctggtcgcagacaaccacgccgtctgggaacttgcccttcacgcgcgcgacatactctttctgcacggaccgggccttgagcgcggtggccattttctcggcgcccttggcatgctttccaatgaacataattccagacgtcaatcggtcaagtcggttgcatggacgaggtaaccattcggagctgcgctcggatcgcaggatttcgatgacggtgttgaagtggtatcgacccgcggcgtgcaccggtacgccagcaggcttatcaatgaccaagaggtcatcatcctcatgaatgattccgacaggaaggctagtaacgggcggttcgtggcggtggagggtgtgtgagatgacctggccgttcttaagtgtcgtttcggggcgggctgtcacaccgttcacctgcacaaggccatcctccagggctttcctctggtaattgtcagtttgcgattcttctacctgaagatccacatctcgacgcattcacgtacatagtattctggcttccggtcgcgaaactcggaagtgaagatctcgaccagctggcgaccccgccatcgctccttgcagttggtattataagtgtaatggtacggtgtgacacgacggaaaccaccgtccaaatagtaaggcgcaggccatggatcgcaaggggtcacgagcacgtcgggagtcttttcaaccggtttggaggggggtacttgatcgaccgtcgtgagggccatggtgggcaacttgagcttgccttgccgtagcaaataggccgtgatacgaggtgagtgagccagatgggcgacagaggtgccagacggagaattgaagagacctggaaagattcgagattccaaaaaaattataagaaaagttaagattcaacaagtcgccccacatgaacaaataatatcacattccacagagcatttattgtctgccccagaaatttaagtatgcgacaaccaatcatatcgatgataaggtggaaaagtaaaaaaagatatgcaacctgtgggaatcgaacccacgccactttcgtgactagaatgctcacttaaatcagtgaaagaggtaagtctcttgagtctagcgccttaaccgctcggccaaagttgcaagattgatatttttagtttgaagatattgctctatgaatagctgagcaaggcaagaaattatcaaacatcgatagttggactatcggatatagcactcataatcgcgccatggacgttcttcgaaaattgttcgaagagtcagttctcatcacagagccacaaatcgtatgttaatcgagacaggccgcttcatctttgccatctctcggctacggcatgagtttagcgatgtttagaaaaccaattaatttcaagaatagataagtctagtcatggtaaatcaacccttgaacgataccatacaaaaggctaccatctatcaggtaaatagttccagacagagccaacgcccaaattgaagagaagataggcagaccgtcactgctaacgctcagatcattgtgtcttcttcgccttcgcctttttctctcttcggcgcttcagggcatccggagtgtattcggtgtcaaggaggtagtcccaccagcggaagctgcttgcgtagttcccaatgaatttctcatggtggaggtcgtgatgatcagcaccagcccagaaaggcaagaaatggtgaagactgtaaggaaagtcatagccactgtgggcatcgatagcctggaacaggcgcaacacaatccagatatacatagtgagaatatgtaggtcaccggtgaaagcacaccagaggatcgggcagctgacagtcccgaagccgagaatcatcacttcaataggagaagcatattcggcagccaaaccaaatggtgcggaatactgatggtgaactttgtgaatcgccttgtagagtggaccccaatgaagagctcggtgcataaaatagtgccaagtgtcctccatgacgaaaaagattgcaatctgatatgccatagtccagggagacggaaaaggaatcgatgttgatagaccgcagaactgggccattgggtggaaaagcctagaagagccgttagtaatccatcgggcccgagaggcaaacgtccggtagaataccactccgtcgagggcaggaacgtaccagatttgaggaagttcgacggtgaagtggctcagaagcacaaacctggcgcagtcccattgctcgcgtagtgaaggcactttgctctgaagcagaatgttagtttccatggcagctggaatcgggttgatttcggctagtgccatgtgttaggcttgccacttacactttgaatcttgtatctcttgaagaaacccaagctatcgatgaagacccacggaagagagcggccgaagtagaccaactcgtggatgaggaaggacatgatgccagtggccaggacatcattctgcatccacgcataccatgcgacccacaatctctctgccacgctcagatgggtattgaatttggtgatatcctgatactggccccaataggtgccggggggcagcacggtagaattcctagggaaaaaaagggtcaatatgcgacaaattccacaaaagagtataattcaaccacccaggggggaaggagacatacattgtggttcctagcaggtcttgaataagagagaagaagcagaggctgagagaaggagaagactatttcgtgaagaggggagtgaaaaaagaaaggatctgggaagagcactatgtgctatatagtgtacagtactccgtatattccctactattaaatcccaatcctgttaaattggtataccacatacaggaaggttccaggcagccaaacagaggcgggcaaatgcgtattatccagtttggtggggctcggatggctatcggcccgtctgtggcctgacctttgcggcgatgacttttatattccggcctggtctcacctcctggtctcaccacttcgggaatggcctgctccgagtcatcgaaagcagcacttaatgggctaatttaagtatccaatcaaatttcttcttttgccgatatcttatccgggagagatagctgattaaaactactgtacacagactagcccagcaagccctaagaacctatacagcacaccatccacttcccaataaacaaccagttcatgtataattctttaccagtttcgcttcccagccaacgctacgaatattgctatttttcaaccttgatgcaaaacccaaccagcccaaaacataactacgctaaacgcctgataatgtatcccaacaatagacagacgcaacaacccaaaatcccaaactctagctggtcacccacgccacattctcacactgctccatccgctccaacgcagcatcaacccgccatagcatcgtccctgactgcgtgcctggctggggcttcccacgcagcaccgcattggacgttgtgcagcgcgagtcggctgtcaggcggtactggatgcattctggatctgcagcgcagtagtccgcacaggaagcgaaagaagtcggcgtcttgggtcccttgtaatcttctttgtcgtcgcctttgctcgcaaagttatcccagttgtctaggtggtctgcgagggttgggcggatgaggttgcggaagatgtcgctgtatgtaagaacgcttgagtttgactgggctttttgtcagtaacatattccagggagatggatataccgccaaaaatgggaaaagaaagcaactcacagtcgcaaaccactgctgctcgaattcccaaaaccgatccacatccgccggcgtcatatggtggaaagtaaaaggcgcaaaacaccaaggtatcttcgcataagcctcatgcaacatatcctgctcccaaaccgactgagtagtaacatgcggccaagaccaagtaagcctaatacccgcagcagcaagcgccctcccaagcacacaatcgcccgcccattcctggttcgtgatcgcatcccacgcatcaacactcattttatggaaatccgccacggtatgaatagccgcatgagacagcacaaaccccgacccaccatgcgcaaacaaagtcgacccaatctgcatctgattccccagatacagcttgtcttcggggttgaaatgcgccagccacgcgagcaggttcggccagatcgggtacgtgtctgcttcgaggaagacgaaccacttggcgtctggcttcgcgcgcagcgcggtgtggatcatcgggaggaatttccacttatccagcttccagcctgggttgtccatcatcccagctgggccgttggcgactttcgtatggtcttgggaggttagggctgtgtgtccgcctgtgcgggcgcggttgtatatagcgaagtcttggttgctttgtttgagggtgtcggagacgttgaggaagacgtcgtgggtgcgtgtaccggctatgtcttcttcgaagtctgagacgattatcttgtgcggcacgcagcggagagtcgttcttaagtgtacagggactttgttttgcgcttccgtgatgcccgtttttaccactaccagcactgagtccattcccgtgtctgtcgggcaggatgatggtacatggtgggtttcagtttttgagtcggtctcgttgtatgtatcaatcgttagcccggagacggatccgaccacgtcctgcgtggtctttgagccgaaatcggcgtggataaattggagtatcaagaggatgagaaccaccgggcccaggataagtacccagcgaccatatcggggcgggagagaaggcatgttcagagattgaaaactctagaggtggggaggaagagaatcggagaaagcggcttcagtgaatatggaaagatctattggtctccatatccagatgaagaccgaaatataaaatataaaagtcgatgggatcttcaggaggggccttgagttcttaagtgatgggcgcgtggggctgattcaagttcaaggtctatgtacatcagtgacatccaaaccagggctattatggcaccattattcatgagggttagttaattagtgtgagaccttgacccggataaaggatgtcaggtatgctgatcctgtcctgtcctggctctatcctcctgggttatgtcgtgcttcaatgtcctctcggatatctagggcttctttgtccgtgttacgtacgtcaccacatggggtgggtccgatgatctgaaacgtgaggtgttgatgtgatattgatcgataatagggaatggagtttcacattatgttaatatgttagagagggtgggagtaaaggtcaagggaagtttaagaccacttgttgcagggttacgatttgcctggtacacccatgcactatactggtacactagagtatgtacaactacatgtacaaggccagattagaatctgagacacctttaaatatcttggaaccaaaaaggatttttgcaatttttgttgtcatttcagagaacaattctctcgcttcacagcgcccggcactatgacaaggcccgagccggacatgccatgcacaatccttaaatttcgttatcgccagagaagtagtatcgccatacaaaaaccccgacctcgtgcaccaatcccaatgaaaaggaaacaaactgggtttattccatttatgcctcggtggtgacacggcccttggggttagtgaccttaacaccgagagccttggccttctcaataatctcgacacgcttgcgggaagaaacggcgtggccgatcctgtagaaattgttagcgtatgactcatataacacgacttagtcgctccaacaggcgcaggacgtactcagcagcgaaggtgcggttgtgcatgaggaggagctcaacgtccttggtgttgtggacgaggaaagccttgtggccggagggcatcatgtggcgggtcttcttgttggaaccgaaaccgatggagggcatggccatctggcccttgaaacggcgacggacgcagttatcaatacccttgggcttgcgccacgaggcgccaacgcgcatgaaccggtcagactggtgacggttgaagcggttcgtgcctaattgcggtcgatgtcagtcctccgattgtgaatgtgagaaatccgtgctcttttcagcctccacgactctgcggataatgtcgcccttcgatccaagacaaatgttgattttttcccagtgatcctccaatgctcttcgtttggtgcatcttgctgagcttgcttgtttcattttgttgacgatcgaagggcgatggtatccagggcatgggtacgaaaaggaatggaacaggtgatcgggaacatacgcttcttcacgatagggatgtgctgcttagcggcgaccatctggaatcaaaattagtgactgaatcgaatatcatgcgcatttggtgactgaccttgtcggtattgttgggtctcgccgggcgttcgagagttgtcgggttcggagttcaatctcgaaaacttctctctcaggttctcccgcagcagagtgggagacccacactagtgcgctttgggcgaactaagcgaaagcagaccacttatgtcagcctagggctggtccagccctagccctactattcctctttgggcgatatctggggatgttctaggtatacatgggtctctcattatgctgcacgttcatcttggggattctatattgttcatttatatgtcatattctggactgatttctccagtatgtaactatcactgcaaatgcaactgaaccttctcgccatctttctcgccactccgcaacatctgctccaagatctcaagatccgccaatgcttcctcgggagactgtctgctgtcgggttttccattcacaattgagtctgcaaacgcagcaacctctggcaaaacacccctgccatcaaactccacatggtgcttctcgccattaactgtcacgtcatcgaagttcaaggtgacgacacctttctcgcaagcaaactcgaaaatctgatcattaaatgacgatccccacgacaaagagataacacccgtagcaccagatttagtcttcgcgacggcatccactgtatcaacgggtggcaggaatggtttttgcagctgcgactgcgccgacagaatgctaagacgctccgtggggcctagaatcaggcgcagcgcagcagtcatgtgcacaccaccgtccaaaaggaatccaccctggtattcaggggtcttgcgccaggcggtgtctagttcaatatagtcagtcgctataagaccattcatgtagttcactgggactggacgtacggaagtacttgttctctttgtccatcaggctgtgaacgttgacgcggaaattctggactttgcccagtttttgaacttgctctgctgcgaagaggaactttgtgatataacggaagttctcagcgacggcccagaagaccttactggtgtcgatattactcttgtaccagttcaaaagttcttgggcagtggcgacatccttagcgataggcttctcggacaagacatgcttaccggcgagcagtgctttccgaataaactccggctgaaccaggatgggaagcctgtcggaattgagagttagtgttttactctgtttgagttgaatctagagaaatcggggtgatcccgtacgcaataatcacagcgccgatatctgaacgagccagtagatcggtgtaggacttgccggagcctgagtcttcggagtagagatcgacttcagacgtgccgctagcgaggtcctgggctgacttcaaggttcgagaatagatagccttgagttggaaatttgagacagcttggacggcgggctgtttattagttagttcagtatattacatagaatatgggatcattggagagtttgtcatactagatgctgctctttcgcaaagagacctgctgaatgttagccaatacaaacaacgtagagtatacaaaaatatgtaccactgccaatgattgccacgccgatagacatgattaatagtaataagtgtgatagaatcgagaagaaagatgtttcgttgcagtacttcggtgctattaaaggaagtccaacagtggggaacaacactttaaactgcgggaaggtccaaccttgacgcacgtcatttggtcggctgcattacctatttaagtagtacatcataggtgacatgcatgtataccgtctgatatatcaagttacaattcaagtcaaattaaaaaaaacacattcataaccagacaaaaagtcaatatgaactgtacactccataaccccggttgcgcccaatatcaaaggggaatccaaatccccaaatgcgaccaaatagacgccaaatcatgtccatcgtcgaataatccaatcgtaccggtcataagaagacaaaaaatccaacacatcaactcaaaaccttccaacgttccaatgttccaatgttgaaacccgtcattgattaaccaatgccctcaatcgctccacgcgcgccacagcattctccaacctctccaaccgaccgcgcttctccacatccctcttttccagcacagcaaccctctcctcaagcttcgcgcgagccttgcgctcctctgcgaccatctcatttgcctgactgaaaagctgcaccgtcaactcctctagctcagtactcgccagcgagagttgcgactcggcagcctcgcgcagtttctgctcgcgcgcaagcgcatcctgcagctcggaggtgtgctcgctgttcgcgggggacatgtgtaggagtggtgttcccagcgcggtcggggtacttgggagggggccgctggatactgctggtgcgggggttgcgctgccacgtcggtaggggaggaaggaggctaggtttgtgaggcggctgtggtatgtttgtcgttgggattgagattctgaggatgttgggcgctgtggtgatgaatggtcggctcgggaggggggtcttcccagtgaagagctgctgcgcggggtgtggtaggctccttggggctgggaggcgcggagacggcggagttcgtcttcgtactcgctaagtttggaggctgtttgcgatcgggttagcggggattcttgtttttaagggttggattggaagaaggggaagggggggaaagtattgtcttctctgtagacgcgtgatcgcattcatgctacacttgtgtgtatgtagtctgtagagatccttcacaggcttacctgcagccaaagcgcgcgctgtcaacgtatgcacttgcccctccaactcctggattctatcgtgggcgccagaaccatcttggggaaagccttcaccccaacacatgggacatttattttctgatataacgacacccttcatggccggtatgacaagcgtggtgacggatgttgttgacatggtatgggttttaccccgggattgacagggtttaatgttttgaactaggcgtactagggttgcaacggtgggttgacggggtttaagaagaacccaagtgatagaaagggaaaaggaaaaagaatttaaaaggctgaaaatcatacgaatccctggcccttcgaaggggtttcaattaaatccatgccggccactccatttcttggccaatcgcatctccttggttcctggatgatctcataagatgttagaatgaatgaatttgactggagactcaactatagtccaactatattcaactgtattcacactatttcgaaaacagacacagttcactatatactatagtgacatctcacaccctcggtcgttgtattaatatgccacgttcttcaaactgttcgagactagtggatcctatttatacccttgcgtccaatagtccaagtggaaatctattttccatgctattactgctaaaattagacataagagacatagagtctcagtataagcatcgtggaaaaggtctgttcttctcgaagtatcgtagatatgtatttatagcctaaagaattctacaaaaacaactttcggtgaacatttcattctatgctaagcggaaattcaattcaaaaaggttagtacgcagaaatggagcaaggaccatcgagacaactctgccatgcaaagaccccaaagaattgaattagcagtcacagaaagaaaagcaggaacaggaattgatttcgtcaacgttgtgctcatgagaggggtgctcataatgactattctcgcagagtcgtcttattcacatggccgagaacggagaaagaagaagagtgtcaacactccgacttccccgtaggtcccaatggcagacaggaacgagaaagaaacaggaccacccgtggtcaatcaaacggaagagaggagaaagttgagagaacaagaaaacagggcaaggaaaaaaaaataaaatggaacatgtagtattcgtttcgcatcggctgtaatggtcatgggcagatcactttgagtcacgcatgggaataatagctagatagcgaacaagacataaaatgaaacttttcggattgccagatcatcaaagcgaggactagatgtatatcggaaaatctagcccacgaaaaaggagaagagatcatgaaaccaaagggcaaaagagacgaagtggaaaggagaataaagctcaatcagaaaaagcaatctacgtccggcactgagaaatggcggaagcaggtggtaattatgagtgacaaacctatcccgatgcaccgctcaaggtaactagaccgagcagcgcaccaagaccggaatgaacctcgtccagaattaacccacctggcgttccggtaaatccaaggctcagggcaaatcggtcgttgcttcggggtatcgatacgtttatgcgaatcctcgaccagtctgtccacggcggttgttgcgcttgttaacactgaccgtgctccatccctcgtcgtcaccgccagcagcaggagcagcaccagcctcaggggccggggctctccagccgttagcagacgccttcttggcttcgacaggagcggcaggcgtctcctcggtctccttttcggtggccacctcttcgccatcctcaccggcccgttggaggatctcaaagttgccacctcccttgggggtctcaatggcatccttgccgttgtgctccacggcaggggctgcctccttagcctgcttttgcttctcagcaaacttttcggccttctcggccttagccttatcggcagcttcctgcttttggcggagggcaagctggcgtctctcctccacctggcgctcacgggtagcggtgtcaatggggcgagcggcaccgaaggggctagccttagagtcgctgctggctgaggtaggagtgggggcggggttatctgagatggtgcgcttcgtcaggttcaacttggggcggctagcaggggcagcaggagcggcaggcgtagcagagggggaggcgggggtgataggctctttgggggtttcgtcggggcgcattctggcgcgccactggttgtccatatcggcagcagtaggtgtgggctcggggcgaacgtgctcggggcggggagggcgcgagccctcgtcctgggaacgtccctcaccccatgcggcctcggttctccggaagctggaaccaggtccgtcgttgctgtgctctcggccaccctcgcggggcgggccaccggcagagggcgaaaggggtcccttgcgctcccagttgttgaagtcacggggctttccgtcggactcaaagttgctgcggcggccaccgcggtcgctacccgcatcggagccggcatccataccacgtccgaagctggagcgctcaggcgcacgtcgctggggaaggtcggggaggggaccacgtcgggaccagtcaagatccttgccctccaggcgagattccttggctagataatctgtcagtcgaaatcattacaaaacaccaaccttcggtacttacgaggctccgcaacactggtacggatggaacgtccctggaaagacgagccagagagatccagagccttctgcagaccctcgacggtctcgaactcgacatatccgaaacccttaggggcctttgtcaacttgtcttccacgagacgaacgttcgtcacgccacatgcagagaaaaactcggagatatcggcgtcagttgaatcgaaggaaaggttgccaacgtggcaagtgtaggggggctgtgtggggagatcaagaggctcccggacggcatatcctccacgctcgcgctctaatcattcaatctgtcagaacatggtctgtgtgtctggcgcggggaatcataccaaagccgccagagccggaggcggagccgtatcccaaatcacccgcggggcgacggttgaaggtggaagtcaatggctgggctgtccatagtgtaagcaagggtttcgatcaacgataagcatgttaggtgcacactacatactggctataaattttgttagtacaatttcgccgtttccatagtggggaaatctggaacttacaaggaaggggcatatcctccatctcatcagcccaagagccaaggcctattagccgtcagtaatcacctcaatcatccaaattttccagcatacgcactttcatcggccaagaaggtgctcatagacatcttctgggctttatttttgggagctagtaattcatcatgttagcaatcgcccatgaatattttcgggggacggatgtcctggaggacatggaaggtctggaacgaacccatgattgcggttttaagttgagggaaacgcgccgggatttgtgcgcgcttctcggagagtagggtgagaaagaagaaaaggtcaaacgatcagagatacctggtgaaaagaccaagaatcaaattttgagtgaagtagttgagtgaggttcaatatctgcaaacccacagtggaaaagttggtagaggggaagtcggctgcggcatggaagtggacgggttactaaaattttagtggtgacgctagcccaatcagaggcgagatcggtctataccagaactgcgaccatcgtcgaaatcgtttgtattttccctggaattgacgaatattgtgagggtaataggctatttgtgcctttgttcgcttgaaataaggcgggaagcgagaaaatgcgagttcttaccttgtctgtatacgatggtgcatttcttatactcggctaaaaatatatcatagaatatactgccaaaaaaaaaaagaatacgaggacaatttcattccggttgtaactttattggctataattttgtcattccaagaggagtcggctgcagtagcctccgttacttgtatgaatcgacagtatgacaagtccgatttatagatcgttccgcattagcgcttgatactatttcatatacttcgcctgagcctctggcatggaactattatatatatagtattgctgtaggccttttgggtagggctcaggtataacgaattttagtggcgtacctacatgtatgtacaacatatattttgagtactggaggctctgatcaggcgctgatcaacgaatatgtgccctcctcaggctgctagcaagatgcccagagatattgtattcccgaagaatatgcaactagcagtggacgtcattcctataccgcatcagcctgatttctaaatatttgtataacaagatgcaataacatcgcaaagctagcttgaatggatattcgagctttatttcaagccttttgacattgtgatagacagttcttggagattgcgtctcgtaccaaagtggaggtttggcttgtgagccagtaggaatcaatcgcaaccatatgaggggaaataaagatcgcggggctggcggtcttgcaggcgatcatctactgggcatgtgcaatgcggggatactatatctgggcctcgttcaccatttatctccaacatgattaaacaaagccagtcgccatagcatgaatataaaatatagaccaaaatctttcgaatattattgtaccaattctgcttatgccctaattcgtccatccaaggccgtatgataacattacataatcaggtacatcaaccgggcacgtgaccatattccttctgacttggattactgcttcgatgagagcttcgatgattgttacttaccattccacgagctttgaactcatgcatctctcgggttaaaaaataatgggtgaccaaatcaaagatatgcaggattttcagtccaacgctctcatgtctgcagccaaggtcggagccctcagcggttagtatctgcccttcgtaagattgtttggatacagacacaacggggttttcaaagatgaagtgctgattttccaaccaggaaccgctggcctgatctatggagcagccgctggagttatcagatcccctaatcccatgattcattcattgtcatgtggcatccactggtttgcgtgcggctcagccttttggtgtatgtggggacactctatgtttatatcgctgatgtctaaccttaatcttgggacagggctacggagcaacatcattaaacatcactaccaagataaagcatcgcttcaggagcgcacgtacacgagtgctttatgcggtggcattgccggcggaagtgtaacgaagttgatgggtaccgtatcccgcaccaaaagcacatattctggcatcacgtctaactaaatcatacaggaggccggctggttccgggggctatcattttctcattactcgggtactgcggccagagcgtcttcaaccgagtagacgcgtggcaaatggaaaatgcacacaagacatcgaaacctttgatgcagcgaatggcggaatctaaatggattccactccgcacactctctgaccaagaatacagggggatgttgagggaaaagctccttagcgtcgaggctgagattgctcttcttgacgataaaatccaggaactggagcagtctcgaccggcctctgctccaagccccaagcaaccctgaaaatagggccatgtgaaaataaggcaaatgcgaattgttgtacaatacaaggggagagagagacaaagaagaggacagagtcgagcataatgaatatagagcgggcctggagtccccgagggctgataaaaggatctcccctgaattcttgggtcgcgtgtcgatcaatctgaacaaacaactatataggaacattgtaggagtctatcggaatataaaatgcttgatagtatatagtctatgaaaagaaataacaacagagccattaatgtaaaaaagaagccaagttatgagatatgacagagataacttagcgtaccgctctttttggccagttcctccgatctgtccggtagcccactctcattctcccttaccctttagtttccccccggcatgattcgcctacactcattttattcgaatcagcctgcagtgctcatcctactgagactttgatgggcaaggtcgctgctgttctggagtctggagtcactgattccaaccagacagacagtacggagtagaaattcgggggacctaacaacagtgccattgaactccgacataacttcaatgtgcgagtcgacactgcctgtctgagatcagcccgctgctgatcgcaaaccgcgatgaccctctttaacccgacctcgattctcgtgggattcctcctcctttacctctcgtcctttttcatcttcgctatcgtccggatcgcgacgggaatctctatccaacggatcggctacttttcgctgcgccgaattgcatacaccccgaaggaaggaatacacattgaaatccgtggcctcggattgttgttacaccccccgtcatttgcccagccaacatggatcagcattcggttgacagaactgaaggtgaccgtggactcgacgactctgggccaaggaaaacgcgacgcaccgcgtcaaccatccgaagaccacgccgcccccgaacctggcggcagaagcaaaacatggaggacgttaacacgaatcaaggaacgtgtcaagcggctacaccggcagatccattggttggctctcgtggacctgactgctatcgacacaaccgtccactttgtcaacgctggccaaatccaggtgggatcgctttctctttcagtcgacacgcggaggaagatggtggaacggggcaagctatttcgtcgcaagaaggatatgtcgcaagaccaacgcccagccgagtggattatgaatgccaaaaatgttttactcaatgtcgacggccgggagccaaccgagatattggataatgttggtgtgaatctccatggacttcttcacaaggatttggacggactgagagacgcctcggtggcccttaaaattgggcgtttgcatattccatatgacgatctccgcacgctattgcagcgcatcaaaccggtcaagaaatctgcacaggggtcaaatacggagaccgatgacgagatatcatttgccgatttcgtggacgaactcgacaagcctggaagcagagacaatgccattatacagacagtggcggactcaaaggggtttgcaagctcattacttcgtggtgtacaggagatacagattgctttgagcttcttccgtgtctcaaagggtatccaggctctgtctgcaggacaaacccccgtatatctcaatgtggtatcgcatgagcttggaattgatcttcatcggatggaccaaaggagcccagagcatcgcatgtatttccagcggaatgatgttgcccatcaggctcttcttgctgctatctctctttccgtcagcttaggcgacgaatcgggcgagaccgataacattctatacatccccatggctacgacaaccatcaaaaccacactgccttcgaagacggtgagcaccttcgatgatgggaatgctgaagagcgaaacacaaatgtcctgttcgcaaatttggtcgtgacatcaccctcggttgatctccaaccgcaacatgtttcgaggctgcttaaactagcacaaaatcgagcttcttctcctcgggcgaagaagcgagataatcatcgattgatttctcgactactcccgaaggcaagcatcaatatttctgttcacgaacctgtggtccggtttgttctccccatcgagaaagagtctggtactcccgatgattacaacctccttatttcctcgatctcctctatttcactcgatatcgagtcctctcattcatctgaaggcggtgcccactattccctatcgtcaatttaccgggtcgcctcccacaaattctattaccagactccagcaggcaacaaacacaatttgctcacaaacgagaatctggagctgaaggcccatttgaacgccactccagaggtctgtgtaatcgcctcaggaagtcttaacgagtgttcagtccacatgattgatggggatgtaaaccgtggaatccgcgaagtcttgcagcaattcatcacccagatgcaatcacagaagcgggtaccaataccgacaaatgaaaaaaaggcaagcgtgttgagacgagtgccaccatggctactccaatttcagttcgaagccacagggtccagtgtggaagtcgctggtgtggacagcaccgtttctgatatatctcgtggtgtatctctgcaactacaatcgtggacagcggaatacaaagctcaaaaaacggagacaaatgtcggaagcattgctaggcgacgcactccgagccattccaccattggcgatgaatcgccctttcgatttcccccaacctcgcctcctaaggctactcacacacaacgcggcgcttcagatggccggcgactggctttccacgcgcgtggtttcgatggctttgtcattgaatcagaggattatctggaacccgagccattcttctctttgcctcgattcgagattgcgctgagcacccactgtgatcgcctcggaccgctcctgcatgtcacatccgtgttcaagggcatataccttcaatactcactgtaccggttctactgcctcggcgttgccgtttccgtgatccaagacgtgctcacacccttaccgccaaagcactcagaggctgccgaaaacaaacccagggcgcctgcgagtgtctcgctaccgccgcctccggcatacaaatggtctccaaaaaaggagcttgtcacatacgacatgaaggcaacagttgtgcagctcaaggcaaacctgccgaacgatcctcaaataatgattcagatctacggacttgccggtgcttctcaacgtctttctactccttatgttaaagccaaccttgtccgcttccatgcagaggcacctaagctcaagggtgtttgggcaagaatcggaagtatgaacaacgtcaggctggatttccgaaagatgaagatgaaacatggcaacactttggtggaagaaaaatctatcgacatatggacagacttcatccgaattggtgtacctcatcatatggtgatgcaccgcatttttgataaccttatcaacacttccaaggctttgaaacagctgcatcatcgcttcaagaatggttgcagagatttcggctccttgagagaaccagaaggcccgaagaaggtgcctaggatatctattcgcagcaaagcgttgctcttcgagttggaggacgatggctttgagtggaaactgggctgcatctatcgagttggcctggttgaacagattcagcggctggcccgggaagacgccttccagttgaaatctcacaaagtcatggaatctgaccagcggcgtgcctcatctcggtcacgagccaagtcgagccatcggacaatgcgcagcgagcgaactagcctagatacaaggcgaagcaggagtgccgatgaacgcccgagatctagcgcccaagaacgcgggagaggtcggaaataccgctatgataccgaaggcgccacctgtctctcatcggagcaaaagatctctgtgcattctgcctggggccgacttcaacagtacaatgctcaagtctggaaagagaagatcgatgcagctctcatgttccagggcacttctatcaaacaagtccgaaatctcttctctggtgcagatgaacctcctccggatgtgaaagagaccgaaaccattcttgccattccgaacagaccgggtctgatgtcggctctgatcagtgatgttcaccttgttattgacaagccttcattcgctatcgatgagttccccagttacttgaaccgaatcggaaaggggatgcctatgtctatgaaatacggcctgctcatcccaatgagctttaacctggaaatgggtgaagcacgcgtcaacttgcgagattatcccctagatctattgcacatcccagccctgcgcccagggcagtccccaagacttcccagctggtctttgcggacgaactttgtcattgcagaagaatggcgtgaccatgaatccgcaagacaggttgaagtggaactcgttcctgcatctgaagggtccgacggatccccccgcgatgcgttcaagattcaggtgtggcgttctgttacaccagtcaagacctattcggaccctgtcatcgagataaacacaagtttgccgactagcatttcatggggtgtctcctatcagcctgttattcaagatatgatgaagatcattgagggtttcacgaaacctgaaattgatccctcggagcgggtgggcttctgggacaagatccgactcagctttcactcccggatcaaggttctctggagggaagatggcgatgtacatctgcgacttaagggctctcgtgatccgtatgtggtgaccggctttggaagcggcttcgtcatgtgctggcgtagagatgtccaattggatgtgcacaccagtgacaatcccatggaattcatgactgtcacgagcggcgaatatgtgctcgctattcccgactacagtgccgaagcacgttgggcaaacgaagctaccactgaggaggttgataacagttctgcatccagcgagcagaagaatgctgcccaattcaaaaaggttattatgaagctctctggcgatgtcaagtgggcagcaggtctcgtcttcgagcgggatagtgagaatgatgagaggtccttctccttcaaaccacattatgaggtcattcttaagaaccccagattcgtcaaaccatccgagcagatcaattacgatgcctatcgtggcttccggagtgaccatattcacctttctgtctcgattattgcaccgcagaatagagactgggctgtcgacaatgtgcaaccgtcttcaagctacaacacaatccatctctcaccgcgattcttcacccacttcttcaattggtggtctcttttctcgggcgtgatgtcgcttcctgttcgccaaggatcgctctggccaggagtcacaaagaccgccaagaagttcaatcgtcatttggcgactgtcaaatacaagattcttcttgcaccccttttcgtggcccatatgtacaagcacaaggatcgcgaagattatgaagagagagctgttgtggccacgggcttgaaagttcgccttgattgcttgaaacttgatatccatcaacgtcgcgagcaaatcaaaacacaagccgggggccgttcaaaacagaccaggacaaccgcgatgcgtattaatcaagcccaaattgatatgcaatctgcagacttccgcgccgtgtccgccagcatcgaaggcacaacaccggaagacgttgagcgtaacaaagacgatatcctctcttccttccaacagcctgttccatcagttgacttgtctcgtttcacaatccctgatcacaatttggactgggtcgacatggatgatttcgtggagccggactggatccttccacaggagtcgaacccccgtacccagatcttacctttggccttcaccccgcgattcacctacttccgcaacacggatcactgcgacatcggacccgacgaaacgggctacagtccatttggggacgaaccgacccacgagtgtgtcatgtctgaaaccaacgatcctcgccgtgttcagattgagttggtcaaagaccgccttgcaacagtcgaggcacagattcgcaattatgaaagcacaattggggaaatcgaaatcaagcttatgaaagaagtagacaataatacagaactgaaagccgagcatgagttattccttcgccagtctgagtctctagcgagacgacgcaagttcttgaccacaactctcaatcgtcttgagagacatatcacacgcgacgagcggactccatatggcgacacacttggcaaaaacgttgcacccagcactgcttctttccgaacaggacgaacaggtacaaccgatggccgttcttcagccctggatggaatttactcgtcggccaacgatgagttctccagcgatttcgacaatcgtttcatgatccacaacatgcagctcaaatggaacaactcgctccgcaacatcgtattgcggtatagtcaccaagtgagccagcggcgtggatttgtctactacatgtctcgccgcgctgtcaaatttatccttgatatcgtggaagaacaggacaagagcgatcgcaagcagcctaaaatgaccaagacacaaacccgaagttcgagcgtcgatgaggatgaggaggaggttggagatcgcattgaacagttgctgaatgatgctaagcgctacgtgaatgtcgaagagaacgatccaccagactcgaacaaccaatcaactccgaacaccccatcctctgccaattcggacagttcgagtgagaatatcgtgccggaattcactccccagaacacttatcacttgcgtctcattgcacctcaaatacagcttcttagtgaaaagaaccagaagtcggtcttgcttgttgccgctaaaggcatggaactcaaggtcgtgtcaatcatggacaaagggcgtgtttcggatgatgtcagcggcttgatacaacgccgtttctccctcgaaatggacggtgcccagtttttcgttgcaacacagaagaaattgatgacaaacttgcaattctatgctggcaataagtacgggaatgcgcctggatcagcgtggccaccgtggttgactttggaagccatgtttgatttcgagttgaatccatttggattctctcgtattgtgcaaaagacttctgccaccctgcgttacgacaagttcaacaatcttcgcctcaagtataacgaagaggtgaacaagaatcaggaaggacctcaacctgacgaccaagaagaccgcatagactcgattagtgtggacttccctcatttccgcgcgatttgtgattctgcagagtactattccatgtacattattgtcctggacctcatgctctacagcgaaccactcgaaaaggtccgaaatgagcgcctagagaggatcatgctcacttccgacttcagtgaccttagtggcgccccggaaatggtgttcaagcttcaagcacgcattcgccagttggaagaaatcaaagagtactttcagatcaacgctaagttccttgacaaacagggctgggaggatcggctggccctcgaacgcgacttgtctctatgcgaggatgaacttttcttcatgatgaaggcaatcacaacttcccaacggcgaatggaaccgagttcgtccagggacgccggtgtccatggcttactgcgttggagcatatcggcgagcgaggtcgtgtggcacctgatgaaggaggcttctgagcccttgattgagttccaattgcgcaatgcttcatatgagcgaaccgacaatactgatggctcgaaccataacctggtatccatcgaacgactagtcgggttgaacttacttccagacgctatctaccctcaaatcatcgcgccttacctcgacggcggacgcaccctcgatgacttcatgttgcgcatcaaatggcacatgctggaggccgttgccggtatccctgtgcttgacaactttgaagtttcattgttcccgctgaagattcagctcgaacgcgagctgggccagaaagtcttcgaatacgtcttccccaacgtgggttctagcgcctttgaggctggtggtttctcgcctttcatgatcaagaacatgaagccacttgaagcttcagatggggaagacgatgacgaaggccccaacggcgaaggccccaacggcgcaccactgacacgctcaacgagtatcgatggtgatagctcgtctatggacagtctcgccatctctaagggaccgggctccatcgaactgcgcctccagccgacactgtcacttttagatgagaccaagccgccgcgtcatcgctcaggccatctgaagggtctgatgatgacacctatccaccaagatagtaatcgactgggtgtctcggagaccgcgcgcaaaacgggccgtccctctacaactggtggtctccgcaagaagaagtctgctgatagtctgcgcatgttgactaaacatcccaccgaaagatccatgtctagccacagtgctagcgaagacagtcgcaagaagttcggaataggtaaagggaccaacaagggcggcaaatccaaagagcaaaccgatgacctgacccaaatgatctcccgcgcctccaacttcatgactctcgcacatgtgaaggtgaatgacgtagttctttgtctgagctacaagggcagaggcgagcacaatctagaggatctccacgatttcgtcttccgccttccagttctcgagtatagtaacaagacatggtcgaacctggatcttgccttgcgcctcaagaaagacgtgattaaagccctcatctcgcacgcgcccgccattcttggcaacaagttctcccaccaccgaccttcgaagcagcaacagaagcgtttccgtgagcttgcatcctcgtctcaactcctgccagacacattcagcttgatgaaacagaacaatgatcaagcccatagtctggccagctacgactctaatagcgattactcggagtcccgctcgcgcagatccatgcagtcgaatgcctcgccattggctaggacgacctcgttgaattcagatccccacggcacagattattcagatcccaccatccatgactcgcggtccactagtgatgtggatgtggattctcgctgggaggttcgtgttctttcgtctcaccgtgtcaccgtgaatatccccgaatgctaatacagaatgtttaggcgtcgcgtcgatttgtcaatgcccctccacccgaaaggccgatgacatccggtaacaccgtgactacgatacgatctggcaagaatgatcaggatgataggtatgaatcccacccccgagtccgtttatcgccgtggcgaagaaaccgactgactcgtctagtcacatcaaaacaattcgcaacatcggccggaagctgacattccggaaatgatcgctttgcttcatctactatatcccttcttttctcttttcgttcctatttgacctaatacctctacacccttttaaaatcctgtgatcctttgtacactaccatcgctttattcccaccagacccctcgtgtctcctagataccctctacctgcatcgggccgtacataggtgactgtacataacatatttcctctgccgggtggggctttcctatcttagctgccgccgcttttacgagggctcagatacaccacggggtaaagccgtgaggttctgtgttccctaacgaatgttagggcctgatatatagaaccgctgaaatcaaatagacgttctgtttgtccttacgatcttttggcctgactagttagttatctagttatgtcacgtaatatagcttagttgttaaagttatagactaggtactcggcttaccgagaacggtagtctgtaggtaactttgtgttcaaccgaagacacaatatatagagctgctatcgaatcaaattgtaaggcaaattatagttttattacaataacccagccattgttaccaaggaatacagttgaagtagcgcgttgcataagcttccagtgtactgccatgtatttggtggcaagtgattctgagcgcaccccactcctgaggctccagatattcacaaatatgagacaatatctctggaggcaggtttgtgatagacattttgaatgaatagtcacgtgaacggttagggatggggttggaaaggggtttcggctcagaacattggaatcatatgagtttaagtaatcaaaggttagctctaactaaaaaaaaaccttaagagaccctccagggctacaacttcgcttatagtgacgtgagttcaccgtgtttctaatactaaagaaaggagaactgatttctgcgctgatacattactctgtatccaacgtattgtgacggttgccagtctactaaagatcagttgtgtcaagacctcagtactaagaaggctgatgcctgaagtatgacaccctgttatggtgcgtgggtcatgtgtcccacaacctttatattatcctcgcatgctgcttctttggagaagcagctattagttccactatgccactgcgtatattaggtgcgaggtcactgtacaacggcggatcctccagctctaggtgccagccatctggctcttccaccttgatcccctttgactcatacccaggtaagacctttggcgaggtctcaacagttggcaatggccagactgtggcgtcgtttgggtcgactctcatgatcaaggctagcgcgaaccataccctctcactgaggggtgcggttccatggtctagagacctcggggcgtctcacgtatgattacgtatctgctacctccagcaagatcgagaacgaggtttatcgtcatcggccagaatatcaatggcttctatggtaagtactggacgaagataaaacaaaaaacccgccgagtgaaggggtatttaccaatagtgaacatcaccctaataaggagaaagtaggacttacccatcaataattacatgagacaacctcatgctgctaccttcgacgttatagaaaaaatatgatcggaggatatctagcaacggcatctcccgaggccgagagaccctggttgatccttcagcggcaagtggatggagccttgtctcagaatatcgcgcatattttaccacaaaagtgaggagaaggatggcccccatcagctagagaccctgttccgtctcgggtgcaaacagaccctggtcaggaagactcatatggcccccattttcagaaaattggacctggcccctaaaattcaatccaggatgcttgttccaggagagaatagctgggtcaggccgccgatgattgcaagcattgctacccataggcatgtagctagactaactttaaattagatgattataagaaggatcccctctccccgtcgatatttttgaatctcacagcattttccctcagtattctactggaaatactagatgtaattcttcttacacgctcttttacttattcatgtttatcaactgaccgctgtagctggaatcagtaatcgtcaataggaacttctacctcggttgctctttttgacttgctaccaggtattttcatggaatttatactacaaaggcttggaagtatatatgctgagtccacaatatagataatcaagtcgcctctagactctcaaaactacctataaaatccatctacccctccctcgtgcacttcttgtgcttcttgaccaccatggttgaaggtctcacccggtaccagatcacgcccccgagcgacgccattgtcgtccccgacagacaatccatgaacgatctggtcaagctgaatccggaaacaattcttcacgccgagaatggaggctattatctcaagaacatggacgaagaggtcgttgccatcgctggggatgacctatgcacagagttcgacgccgtgtttgccagtattgatgctgatgtcgtcggtgacggctctagatctggggatgagggatctggatctctgggcggggcaaatgttacgaagaggaatgaggatctcgcgttacccgaactgtatgcaaaatttctgcagccacccccgttgcttccactctgccacctgtctgagctactcgtattgccatatatgctcctcaagcagccggaaagtttgtgtctagagtgtagtgttatttgagacaatattagagagcctgtacggaggtctgaaagggtgtggcacgggcagtgaggctggaagaggaacacgagtgagaatatagcatctgccacatctatcaatatcctattattcgctctgcagataattgtcttttgtcttcatagatgaaatgagtattgtttgccaatttcaggtactctgatcaactcatactatcgtattccactatattctttactaatttaatgagtgctataccttgaataggtcaagatatagttaaatttagttcctcttttgattctttcagtaccttcattttaagcttgatactcgtttcctgctgggacaggtggctatgatagcgcttccttgtacatgtacacactagttagtggcttccccttacccatgatatagatagattttgtttagcacctcttcatttatgaatatgtaccaaggctgacgtcgtagggtaatttaatctctgaatatctccactggtcggtaatggctttacagcgggggaaattagttgcccagtctagtctctttcatacactttgtagtgtttatacgacgaagtatgtcttgcgtgaagttaatagtagaggagggtataatgtacgatccctaggactttagtgggaagtctagatgtatataaaataataaacaatatcttagggtcttaattctcccagagaataaacagagggtatctatatacaacatcattagcctgcgcagcaaaacaaaatccaaagaatgtcaagtctataagccctctccccaatgcatttgcatgagcaagcaaaaagaccaaaatgagaaatcttcattggaacaaacaaattcatcagtcatacatattacacggataatttctccgtagatggttcggcattggaagaggagccaagagttgctccatcataagttccatcggtgacgtgagacgcctcattaggggaatttctggaggcatcgttagagacatcatgggctccattggagactccggggacatcatcggatattttctccacgccttcggatggtgccgagggatggtggtgatgattatcacgagtccagggccagacattagcctggacggactcgaagcgggtacgtgcagtgggcgcgctgatatcgtcaacccaacggatgcctccttgtccacggttttcggcccacgcctgcttctcacgacgcaggtcactcttaacccagggaattgtgatcaaggtccacacaatagcccaggcaaacggaagggaccagcccaactttacgtaaggttagtctgattgtaatttgagattaaaagaattccggcttaccgtaaacgcaacgttttcctggacagtgaaaacaatggcggtaatggcggcagcgcagatgatggaccctccactccagaaacagttcatttcaaagagcatacggcgaaaataaggactcgataggtatcgaattcggagcgcatatcgatacatctgtccaccacctccgtcaactgctaccacgtcctcaataagcgcgtacaatgcagttggcataacagagcctttgggcgtggaagaaattcggaatggagccttgaagcccatcatacggaaaatgtcgagggaaaggtagacgatgccgaagtagaacatgacggttggtaggaccatggcgatgaggcgtactgtttaagcagtcagtatgaggcaattgcgtaagatattatgattggttggtctaaccatatggttcttcaggtaccgatccactgtgaacttgttagctcattgttcatgctgcttccatgatatatgctagacttacacgatcaattcgacggccagaatcaaccacacgatggtgaagttgatttggaagaaatccagctaacaagaggtatcagttaatggtccatgatcaatcccaggtcaaaacctacccatgatacgcgggagttcaggggccgggcgcgtgagcttttgcggaataaattatgaaggcggtagaagtattcgaagaccgagactcctccaagcgatgcggtaacgatcgagaagactgcacatcaaaattagcaacctggacgggcgtatttgttccaccgcgcaagacataccgatgttgggcgatagatcggtgaggtaccaaagacaccaatacagaatcaacggctgagccaaggtatcgatcacgaaaatagtccagaagaacgcaatggacttcttccttgtgtgcaacgagtacgggagcggagggggctcggagggtgttgggacggctccttcttccatcggggtggcgatagtggcggattaccgttgttgataggttcggggaaagcgcgataaaggtttgatgaagtattaagggggttattaggacatggtgcgaatgtgatgatgactccgaatgggtttccagagagaaataatccaagaaaatgaagtgaagaagaggcgaatatgtaaattgaacgcccaggaaattttggccggaaacaacggggccaggtacttccgttgccatactatttggctgggaggacaggtacctgacgtaagactccatgatgtcattcaaaacacagccctgatcaaaccacctgctaactatgtgggcatattttatgcatatatcccttggcgaattgattttgcctcttatttgtctggggcttgaggatactaatatcgaatatggcttatccaatagtcctctatggatatagtataaggcaaaccaaaggggaattaggacgacgtcaggtagttatgcaatagacatgaattcataggtatgagtcagcgaagactaaatatgcacaaatcggcagaaaacaaggaatcgagacctaaaaccgacctcgggaggcataacggataccgattccgacatggctgggcccgacctcgggagtttacgttggagcttgttcataactgccccagtcatacggagtactcggtacaaaggagatatctcgtatgttctacagcatactatggggtaaatacggagtagttatacatcattaattgttatacatcaattaatctactctacctataatggacaatgtactccgtaatcagcagagacctgaacattggttgcacgtaggatattcttctgcaatatattttagataagtcaaaggatatcatgaaatctctccaatagcagtgaatttattattgttcatataaaatagaccccggatcattcttgatgccttacaaacaaggcacccacattgagaaagataaggtcatgtgacatgacaatcgcactgcaaaatttggaagctcggcgttcgaatccccccccttcaaaaatttctacccttctttaattttccgacacccatcacctttctagtactgtttttacttccctctttctatccagaaaaaagacatgtagccatgcctggcgtacaacatcttatcgacttcgtgctgaacgaagtcgcgctctgcggtaatcaaggtgtgtatagtctcttcactgggacccacttttcatgcatatggattttcaatgtcaccggaattatgtgaaagcgccctagtatgggatatatgttgaactcctacttcactctcctctcgggactttcgcatgatggatttgagtttgcattcttgtggcgcggacccaatgccgatttacatcctacatctcaagccttgattggcgcttttattcttatatacacttcgatgaatcgaatgctaacagacatcaaggtgcaacattatctgatctactgcaagccattgatgatttccatacacaatctcaggatgtgatggaaaaccagaacattgaccatcgtttcaaagccaaagtctggtcctggctcacgactaacccagaggtgtctattggccagcacaatgaatggaaccatctcaccttaagtgaagccgagaagcttgactcgcgaacaagggagaaagatgatgccgatagcaattctttggagcccaaccaaaccgcagagaatccggatttaccaccgcttcgaatctttgtctccgaagagagagcctgggttgccatcactggccatccaccagatgagtccaaggtactgccccttgaatttgccttactgtcggtgattgcttcgcgcaagtcaaagggtattgtgcagccggacctggtgaggctcagtggccaggataaacggtctgttccgaagcgtaccgatgctttgcaaagaaaaggatacatcgacaagcgacctgttcaaacaaaaacggccagaaccagcctctgcacgctgcagcggttctaccgccacactattagcgatcaaacaaagtcagaaccgcaatcggagaacatgattgatttcgacagctttaacaccagcctgttcaacattctccgagagcacccgctgattgcacgcaatgatttgaaacgactcctcggctttgatgaccattggcgttggaaggtcttgtcccgtgccctccgcaagtgggagcggataggcgtggtacagcgtgtgagagccgaatcgcaatacgaaagaatgcatccttgtgtgaagcttttacgggatcccacagggcaagatctggaacttttccatgaattcaatttcgatgtcttgaacaagcatggggtgcgagccaaaggaactaaacctaccccggaccaagaagaccgagaattgcagctggggggccaaaccaaaagatcgcctagtctggaggacagtggggttgatatgatcaaagagcatgttggagatgctgtacgtatcgtaccgtcttggacgccggatcgtaacctcaacaaccaaatctttgacatcgttcaaggaacaggtacaacaggcatcacgaaccaggtaagtaccttactcgcgaaagtgaagatattcttagctgacaaaataatccagaccttaaacttgacttgctttgggtcctttttcaagagacccgctgaaagtatggtgcatcgcttggtcgacctatggcaagtggcccagccacttcatctccgccattacgccattgttcgagatatggcaatgaaaaagaccatcatgttttatgtccactattcgctaaacaacttcgcaaagctagttgaagctggccaggcatcatgggaggccgttgagattccagccaagaaagccaaatcgctaaagatccaggcacctccctttggtgctcttcctcagcttgatgagcatggattcctcaaaaaggaattcccaaagaatatgttgaaggatccaaattcaactctactcgacgggatcacggctgtcaaaccgcccaactatcttctttcttcgagcgatccttttgttgttcaacttccaaacggtcaatatggtacgattgccccttcctctccttggatttcataagagaaattaccgtgaatctaacattaagccgcagtgatccgcacacgaactgataaactcccccctggctccaagcaacagtatgagccccgtttccggcccaagggacgaccgaaaggcagattgaaccgcgcgactgtcgaaaagcgtgccagagaatccaaagccaaagaccccatagccatagagtctggagctggagaacccgacgctagccaatccgaacccagagaatctcaagccgtggaatcccaagttaagccggagccaagccagggttatagctgggaatatgtcgaagaatccccgcgagccaagagagccaagataaagcacgacagccttagagggttatcaaagaaagagaagtttgaagcacttggtatggatgagagttggactgaatacaacgctcttgtcatggaaaagcctgctcctggtgtgtatgtgactccccacggccgaagaagaccagccggcaaggcccgaggtcgcccgagacagagccgaattgcgatcttcaaatcgccacagctagcatcgatgccttggtttgtcaaggacgaagatgattcaagtgaagacgacaaggtacgggatgatgctactactactcgggcatccgagagccttgcccctgaagctgcacattcagtcatcaactccgaggggcctgcaatgacccccactccgacaacttcaaggcgagccaagagaactctgcccaatgagccagcggcctcaccgacaacatcctcgagttcccaagccaatgagcagagaaccgggagacctgccaaacgatctcgtcttcgcaaggcccaaaatgaaaacaacgaagaaccttcgaaggacgctaacgagatattgcccgaggttgtagttccagcactccaagagggttcaatcaaagcgagtacaccacgccatcgtgacaagagtgccagcgctcgtatactcgaggacgaacaagctggaactccctcaaagcgacgccgtgtggcatcctccgaccgcgcgactttacaatccccaacacctcgtccatctgatgtcccgacaccacgattgggctcagtggtcctccagaaattcaattttagcgccaatggcaccaaacctaccagaaagccacgtgttcggaacagaactaacatcagaaacatgctaattccagaggaggaagaatcgggatcctctaagcctttgattgggagaggcggatctatcagtgtccttcggagaaagctcatcatggaaattatggaaaaggctgatggtgtatatcctgcgggcactgcaatgtggtatccttttgtcactgcatggatgaagtttcatcccaaggaaaaaccagacatgcgaactatcaatactgcgtgcaagcaactgattgatgccggccagcttcggcagctaactttcagcggccgagacacgagaaaagtgatggtaacaaggacgttgttgttgaagcctgatatctcaccagacgatccgttggtgaaagagatgcagaaaaagattctggctactgatttccacgagtcgcgacccttcttttcggccaatgtcgagctggatccaaatttgacaagaaatagtggtcgaccacacggtgcacctccccgcacgcagagattctcattcccggtagaagaaggaacccatgttcacttacaacaaaagcctatttccattgtgaacttagaggcaagaaggaggagacaggcccagacgaatttcattaaacgtctggaagccaaagccaaagctgccaaggctgccgaagaagcggatgaactgcctgacctgcctggagttcagcgactcatgacactcgcacgccctcctcaattggaccttgattctcatccgcacacatcaattattcgtccatatatccgaacaggtacacgtggtcctggcaagcaccaaaagtctatcatacatcccaagcgggtgatgaaaccaatttccgccatcggagcgtatgccatgttgatgaatccggtgcaacagtttgacccggctagtggaactttctctacggggtcgtgctcggccagacgccgaagaaagccaatggcagcaaaacagccggttttgaacattgagaaatctgtcgacgagttatctagactggcttgcgacgaagcagactcggaaatccctagtgctgtcaaagcgaaaattccactgtcaacattcacccaaaagaccaaaaagatcctcaaatgggagcttcatcatccaaatctctttgaagcgaaccttgaaggccagcagtttatcaaccaaactgttcaagatgctttcaagccagcgccggtcacaggcggtatttgcttcgacatggatatacctcctccaaaacagcttcaagtgcctgaaatacctgaagtgcctcaagtggaaccagatttgccagcacggcgtagcgaggtccgtcgccagcgtcagtctctacctgaacctctgccccagcctcctataaaaactactccgataaccgagacacaaaaacggacacccaaaccaagaagaacacgggctcctcgggccccgcgtgctcctgttacagatcgccgtctggccaaacttgatgatactgcaacagccgacaaagaagcacagtcggcgaccaccaaacgcattcgccgacagcgatttgtgcgccctatatccgaggatctcaaacaaaagatagtgattgctcttgtcgtcgttcgtgtgcttgcaggcggagcggaatcaagagtgatcgattggcctcttgtgacaaaagctttcccagatcaagattcgtcttttatcgaagggcgagcgcgtcagatactcaacaagaatcgcttacagattacgaagatgcatcgtgatttccaggagtgcttccttgaggcttatgaaaaggacgaagttccgcccattgactattccgacttggacagctatgactggcctgccctaattgaatgggcaagcactaggctcgatgtttctccgtcggaacgggctccggacctcccagcaacacggcaacaattcgacagtgttttcgaactacgcgaggatgctattacggcaggcgacgaactgtatcaggctgtgcatggtgtcactataaaccacaagcgcaacctaatggcgcgcaatccattcgctgtacccgtggatggtgagacacgcgcccagccggtttcacgaaaagttggtacagcacaacttgaggctgcgaagacatgggttcgtgcaaatatcgtcaccgcagaagagacctaccgacccaatgagtcgagcgatattctgcagcgctttggtgatcgacttgtcaccactgcgacgcaggcactactcaatgaacgtgtcatcagctcaacaacccgtggccgcatcactccgggtcgcaactatgatatctcggaatatttcctgcagacactgagccgcaagcgtgccgtcgaaagcagccagctgcgccgtgccgctcatttcaagtcaaagatgctagatcttcaattccgaactaccggtgcatccgacgtggagtacaccgcagaagatggcgatatcctcgcattgatcaatctctacgcttcgggtgctattcaactacgaccccgcgatgcccctcgcgccaagttcggcctcaccgatggcggctatgaaacgcgccaggtggacaagaaacgattccgtttccctgtcgagattactcccaccgcaacataccgctacggcaaccccgtccatggcaaggctgcagccgcgtaccttccacccgcgccttcaccatcaggcccggaaatgccacctaggaaccccctttggtacgacatcaatggagagttcatacatcgtctctgggatctggttattggccctgttctcgggtgcctggtgatgcggcctggcatcaaggctgccaacatttctaacatgatcaagcccaccatgggcgcatgggaaactgtgttgatgctgcaatggctcgaggaagttggcattgtcaagccagatggcgagggagacatggcttgctggagattacaggagtcttggtggatgattctatcttgattgcccatcctcgtgaactacttatcttgaatgtaacattatgtgaacaatgcttgctagccatacttctcaaaaagtcaagaaaaatacaaaagaacaaggatatgggtgcttgatttcaaaaactatctagaggtatattatagatcaactccggtaatgtaatcccaaacgcctaaatagccagcgaaagaaagtaatgctcaacatcaaccccatattcgtttacagatcgtcgacgttcgccactcggcgcaatatcaacaagataagagcaacgatcaccccaatgatagcccggtccagccagatactttcagatggagactccgtcgaagccaattgagacgagcttgtctgtgtatgcatagcagctgcagccggtgcttgtacagcaggcagtggtgcctgtgcctgtacctgtgcctgtgtttgtgccgcgggcaccgatgtagacgcagaaggagccggaacaggttccgcagcccgagtactctctatagcatcatctccccgagcctggtgctcattcccaacagttatagagtccccactcgaagccggagccagagcaccagtatcagcatcagcctcggcctcggcctcgaccgtctcccgttggccctcgacaccagaacacccgtccacagccgcaacctcaccctcaacctcgaccccacgctcccgacaaaccttccacaattccctcatagcctctagattcccagccccgcactcacgacaagtccacccaagcgaaagccgcgcatactccctccgcagctcctcactcccctccatgcccccaacctggccctgactctccgaactgaagatctcagagcggatgcccagcaatgcagtgcgcacgccccaagccggctgccatgtctcctcgtggtggccggaaatgctgaggcagatttcgcggttgacttcgaagcggccggagggcgtgaggaagcggaaagaggggggacggagtgggtatgtggctgggaaggtgatacggccgtggtagaggccttgagcgtagggggaaggggaggggggtccggctagggtgaagtgccagtcgtggaggtttgtgtcgtttattggggcggctgtgaagtatggacttgggtttttgtggaggtcgctgctttctttcaggaggcggcgggttgagggggaggacattttggtctttgtgtctttggataggattagatttcgagtcgaggatgttctaaggttgaattggacatgttgggaggaagaaagagcgataagacaaaaagataaagatgacagctgtcccgggtttgcgggggaatgatgctattgggccgtggcaacgttgttacggacgacaatataggattcggaatgattagggcatatcttacagtaataaacattgtacaataggaattaaggtctaatggacatgaaagccttaatatgaggcatccataccaaggctgcgcatacgctttgtagatgccataaacacaacgccttcaacatgctacttaaaaatgctacaaacaatcacttgttcttagtcccaggcccgccattcatcatgatcacggcgtgtgggttgctggcggccagcgcccggatccaataacccatcgtcctccacgtcatccccataatcactatcgccaggccgcggccgcggtgatcgaggtgcaagagtctgcatcgacaccgacgtcggaggtcgatcaggcaggccaccgcggcttgtcacccgctgctgtggaccgcctcccatccaactattactgttgtctagattgcgctggtacaactcacggtagtactgctgctcctcggtggattcctgttctcggcgctgtcgcatgcggtcccgcgcttctaggaatttagcactaggctcccagtgccagccatcgccagtagttgtgcagatgggcacagcccagagcagcggccggtccccgaaaaggtggagcaggttacgccgccagccgtggtcaaacgcgctgggcattttttcgttgtcttcgtcgttttgatactcctcgtaccgcgagtgctcgcgctgccgttccatttcggcgtatgaccgcgtcaacgcttgttgcgctggcgtgaggccgttccctgagccgtctgggggccctgatgggcgcggcacaggagatatgccctcttcgggccgggtgactcccgggattgcattggcgtgggcatcgataatctgatttccatagtcttgcattcggttggataagctttcctcgcccggctcgccccaatagttattgttgggcgccggttcattccgctgtctgtatagcgctttgcgcaaaggcgacacatatcgggtcctttccaaacattcaatggtagtggtaccccgtatagctagactgatatgccaggctgtaaatccacccaaaaccaatccaatgatgccacccaggatagccagcagaactacattgaccggaagaatagtatccatgtactgggtatcgtttaggatctcggtccagacccagacggctgaaatggcaaaaacaacccaacagaatatcgaggtgtagatcaaaaatagcaagaatgccttataattatgcagcccaacacatgttgccagccagggacaatggtggtccatcttgaggacacatcgtctgcatgtcgagcagtggtgcgcgcggtccggcttcggacactggcattttttgcagtatcgtgattcacctgtcgaggtgacggtatacgatgtgaactccgggtcttcggagggagggagggcgctgtactcatgacggtcggtcccgcgactagtagaagtcggtgaccccggatcagtgaaaacagcgacggtatatgagaaattgaggagggcgtagagggaaaatgcgaggatggaactcgggatacctaccgatatgttagtacacccggatacatagccccgttcgagtccgagcgatatcctgcatacctatccagtcactccgtgacggtttgatgccgatgctgacagcgacgtatactgcccatgtggtgaggccgtagacgaaggcgagtggaaagcaggttgctgctgcacagcagtaccgttcgcagcggagagcccaggctcgagggcgtcgtttcggccacgagggcgaggtcgggggtgacgaggccaaggtggccatgactgagatttatgacacaagggaaagaagattatgcattaaggattttgacgggatcggtcccattataggcaaagcattgaagataagacaagtctcaggaaccgtacctacaatacatatgcgatggaaacgaggctatcaggtgagatgtacggtaaggtaaaccgggtacggtaattttgacatgctccgccacggccccagccacaagaagtgcgtacaacatacgtgggggacacgaagtatcgtcataacaatgttctatttacggcgttgaagcatattttcaggaacagggaaggcatagggaatattatcaaataatcataggacactactttatatactcgtatgcatgttggggtaattggtgatatatcaatatttacagtcataattctaatagattcatcacggctctgccttgaaatgcaatgcggattgttctcgaacgtaaaaaaaaaggccgaatcagctgctggtcgcattggaggtcggcaggttgttctgtgtacaccagccattgacgggcagacaactcaaccgatagcaccaagagcagttcgaggaggggtatttataaaaatcgataagcaacataatgaaaccaatgaggaccgcgactagggcgccagcacgaaccaaccaccacagccaccaaagagccttgcggcccttgaagaaaccgagcgggccgcctgtaggaccggggttttctgatgagtgggaggtgagaccccgtttgctcttgaagaactccatgaaggggatagtcttttgctcgggaccagcttggccagctccgccgctcatggcaacatatggctgtcgtgccagaccaatccgctcgcggagagcgttaggcgaccgcatgatagtcaggccaatggcgagacccatgataaagccaccaatgtgggagaagttgtccaatcctgggagaagaccaagaacgaacgagacacccactccgagaagcatgatgataagctcaacccacggagattcgcgctggggccagtcatacagcaggtcgagaagataaagcgctaggataccgaatagggcgcccgagcagccatcactaggatcgagctgcgcggcgtagtttccacccaaaacgaacccgaagataccactggcgaagtaggtcaaggtatagcgccacatgccgaccatacgctccatgtctgcacccatagtcatctgaaccaacaggttgaatccgatgtggatgaatcctccatgcatgaagatggggataatgaatctgtaccactggttgggagccggccgatcgtctgttgaccctccaatagaggggttgggaacaccgctaaagccgcacacttcagacagtgtacaacccgttcccgtcaccgttgtcgatgtggcattcggacagagccacgaaagggtataattggcatcttggattccctcaacgttcttcatgcacgggttgtagcgtgctcccatgtatatttggacgtatggtgagggcccgatcatcggattgaaggtaggttttgtctcgatcactgaccctgtcaactgagctggagcggaaaagaatttcgttagttagtccgaaatgtgggaatcgactgagctaggaacagaactcaccattcttgaccagttcgataatgaatacgatgatctgggctaatgtcaagatgtatgtcacccaggcaatcttcttgctgaaaaatcccttcttctttcggccgtcacgttgtcggctatcctccagaccccctggtgatggagggtactgcgtctgttggcgcatccaatctggattgtttccatactgggcattggtcttcagaggtatattttctgcgtaattatcgccttccgttgcgcgcccggctgtctggtaatgtccattgtccgatgcaaatgactgttgactctctcggttgtgataaggggctgagggatcgtcgtgattgtaaactggggttgcgtagccgagtccaggagctgtgtgcggggcgttatctgtctttccggggacagcttggtcgtagctggggggttgtgggatatttgcgtgatagtattcgttggaggccatggtgcctggggttgagtctttgttttagagttcgggagcaaaaaggcgaacccgtgaacccgttaagatggttatagagagcttaagtggtgaagagtatatataacaaagagcaacccagatgaaagaaaggtaaagtcaggcagtcgcattattcgcgaagttatttttgggcggatctacgcaatcccagcaatgccacagccgcgtggctggggcttttccaccgaggattttccactccgccctagcggacctggttattggttacttttccatagggctgctaacgaaggggcgacaaaattgcgtcgtatctgactaatttatacttgctcttttctataaagataatctcgaataaattcccaaggtcccaaggttgtgcctgatccttacattccggcttacgtaatacacagtaaacagcctgccaaggctcctaattgggattagtgccctagatgtgaaaccttgttttcccagagtgggggctcaggccgtccacgtgatgagaagcctttttagtcaaaattgtgcccagaagagcttaggcgttctataaaaatatccaaggttgtagcgactcaactgttttggaagcctctgtagcaaagaaggtctgctctcggtcaattctttgattttaatgaggtgtgactgtataacttatggacaattctgctagagaaaccggtaccccacaagatgatactccaagatggagcggagctaaaacgtcacctctagggaggatattgtttaatgtggggagaaaatctgcgtagactactaacgattattaggtttctgtcaaagagcaaggtaaataaagcaataaggtcattatgatatgtagagtatagaggttctcctttcttttagctttctttccttgaagataatgtaaatgctaactagctagcagagagaatctaattgatcaaatgcggtatttaatactagctcaattatacgaaggggttgaagtgaaaactctgcagattagcacaaacctacaatttaattttgatctctttgatctatcactatcaatttagatagctctcatagtgacctctgaattcatggggttgtaagtcatgtgaacgatattaagaatacctaactagacatacctaaagtagtttagcggggactgtaacaatattgcgtcggtagcccttcttttcctctttcctctttcctctttccacctcctgcttcattgttgccgctatgacagcagcacaccagagcgagactgaagataggtttcttctcctgcgcttccttgcaaacattgagatcccagagacgatcaccaaccatgtctacataaccaaccttcaatccccgatctcgcgactgagagatcttcgttcaaatcgaagtcagctccaacaacacctgagcgccagtttgttacctttgtcaatgtcggaataccacaatcaacagcttcgagatcagcacaacctagattcaccagtgtgacatataaatctcgcatgcgttggctctaaacgaagactttatcttgcaactcgtgaaaataagacgtatttgcgaactcactatcggtggtcagattgactctgcaccgacatatgtagcgtcagaccaatacatcatctttatcagagaggcgttttagaatcgaaagttgcgccatttcaattgaacgacaaggtcaagatactagagagtaaatggcaaggctctaaacccctcgaccaagatactatcaacacattcaaagaatgtttactctccaacctctgccggttatcatcccgggctaggggcgaggagtatacacaaaagtcgagttctttctactactgtcgatcagcagtctatcacaatctcagctcactggaccatttctccgaagattcttataacatcttcttttattcctaagtcgtttgtcactgtgtgtatcacgcatacaaaatggagtgaattgtctgaattgtattgaggataagattcctaaatcattggccccgactaccagcaatctctctacttcgtctactcgcaaacccagttctgaatatataatgacagaaacatgcactctccaacttccaccgaattggataaaacaaatagagctccatttgcacgaactctacggtagaaaaggactaaagtgtgtcgaatttcgtacagcgtaatttaccactagaccataacaaaaaccaaggttcctgtttagggcctagaggggccatatcccattcttgacagaaaacattgatgtcggaaggaattgcagacaagatgtgctgataaatttcctcgggttcgtcggataaacttcatgatccagctgttggtttgtgaattctagagcaatcgacctgagtgcaagaagtctcaagagcttgtcctcgggactgagtattcgatctccttctacgcaccttatgtgctcaaatcgaaggtcatcacagtttcgcttgcgagatagtagctggcttaggaacttctggccagcttcctatacccagcttgacaaagtgttcaattaagggtccaggtctatagttcggagatgtgatcggcccgtgtttcttcccaaggttgggattctgccgctgatgtcatcgccatgtttcatcttccccgcgcctgcgacatctaatagtcaacaccatcaccatggacgaccctcttatccaagcattgcctccggctacggactacctgacttatcttactctgctagaatatcagttaacccccaaacgtctgccacttttgcacaccctcctgcaagatgagaagcttacgacgaacatcggctgggacttggtcaagctgctgctgcccatgctaccagcgtccacagaatgcctacaggatgtggctcgcctaggcaatccccgagaagtgatcttgcgcgtctctgagtctttgatgcaacttcagccggaggacgcggacgaggatgaaaaggctggtcagggactgcccttgcacatcctacaattcaattgtcttctcggcatgctttcggtacttcacacacggatccagacaaaagcgccaagtcggttcatagcaacctccctccaagcagcactggaagcgtatgccacaatggtgaccaatgagaccaccctcgccttcctcgagttcttccgcgaagtgtccccctccaagcggcctgcaccaccccccagaactgctagcgagtcgagcgtcctgaaagttgccgctgcctcggcaccagatcccgaagctgaggtatccacgccctctccctctaccgataacgaaaccctccttgttcggaagttcattcagttcggtttgcttgaactgctgaagtcatatcttttgagcttctccagtccaatggacccgggaatgtcgtggaccattcgcatgcaggaacacctgcatccggatctgcggctacccggcaccaaatcgcagaccgatgcatatggatcgaccaaggagctcaaggagcgcgatatggtgatgggaaaacttatggtaagcaagatattatgaccggcattatatcaaattggaggacgatttatctgactttgcttctgcttaggctctatcgcgagacgttggaattgataacgaggaactcttgtcaatcatatccggacccccgacagatcagactgctccacttgatttcgatgaaccaccaataaaccccaaccagattccgctagaacgccatggttcactcctactactagcggctcgagctgcaggcgcaactctctttacctctgggcaaccgctccgtcaggtatccgttttccctgagctgagtcagatatttaacaactttgtcggcggccacaccaatctcgacgaagtggctttcggtcaaccccatgcgcttctcgactccctgctggctttgactgtctacgcactgcaaacccccatcgaattcccgtcaagcgataccgagtttaaggatttcgttatcatcttgactgcatgcacatcacgtcagagccacggcatagttcgccagatcccagctgccattgtccagagccatccgtcagctgagacgcgatttaagctcatatacaagatcttggaagatgaccatcttgcctcggcgcgggatagcgccatcgcatggctgaaggatgaaatactccgcagtccccaatctgccgacaatatattccaggatcctctctacttctgggctctactgccggctcttttcaaaccggtcactgccgccagctcatcatccgatctcgttgctagctggtctcgtctaacccaaattcaaggcccaccacttcattctgcgttgaatctgtattacttgctgctttcctcgccatcgctacgtgaccggctccagctcgacaagacttctaagttcttccgtaaccatgtcctgaaccctctcaggcaagtgttccagagcttcgaggacgatctcaccgccaaaggaggcgagggtgttattgaagctgcggtgggcgaggagatgtgccagattggcaatgcacggtctatcggacttattggtcttacactagatcaaatcgaggagacatccagcgatgcatttggttccgatgaaggcgatctgggcgaattttccgaggctgaagaggctaaggtgtctgaaatccggaagaaggtggatatctgggaataagtacagatccaggttccttgtacagaatttagtagatatgatgtttctacgaatgaacgctttcgtcaccttgtatctaaatttaatcagagtattacgtagctgatgattcggtccaacataaggaagcacgaggcttgccccctgtagaccttttcctctcgatacagttgagctacaagaaatatctaaggaagaagattccttgaggcaatgatccattcctgtcaactatcatgaccgattctaactaagaaataaagccttatccacccaagccacccccgaaacaagaaacgaatccgcaccacattgcaaaagagaaacacaatcaaccgactttaaaaaaatatgtaatgtgaatccccggatatagttgaaggaacggaaaagaagttcctttttaaaagaaacgttgtcacccgaatcgtccacgaaaggttcgaaagagcacaacaaatcggagtcggcagtcgtgaagaccatcggaagaaatgagctgtctcgtcgaagaaagaatgaactggacagatagactcgcaaagagtcttcacaaaagcaaaagcaaagctgagaggtcatgtttcgaggggttgatatttttggttgaaaagttgaaaggagtctcaagagtccgcggcgaagattgcgaaaaaaaaatgatgcatttcaatgtctatcatggtgaccaacgaaccaagtcaggccatggcggttgatggaatgttggaattgggcgctctcatggagggtgtttagaagtcagcggctattcacgaagacatgtcagtatataagtcattattggggaaacaaatggtactcacggttcatgacgacgcagccgccaccgggggacttcatgacgacgcagccaccgccaggagaccgcttcatgatgtcgcagccggctccgggggttctagtgaccacgcagccgttgggaatgggagacttcatgacgacacagccaccaccgggggacttcatgacgacgcagccaccgccgggggctattgagatgacatgtcagtatatgaatgtataaaagagatgacgaagcattgcatgctttggaggcaagctactcacatcgcttctggacctgagcacgagacattttcgaagatcgagaagagcttaagaagctgaagattgaaaagattgtaggttgtttaaatgagaatgtgagcgggtggtggaggaaatcattgaaactgggtgtagaagatgatacttatactcgacgagggactatttttcggactatcaatacaatcgagatcctactcaaggagtggaagttaatgcaagagtcacattgagttgctgacttgaatgcattgggcatccatggattgtcgaaggcatagagtcaatctagaatgcatgaggttccgattgtagtggatgcccattgcggggctggttgatattgttctcgggttcatgaatgtaggcgtcgttgcctctggaattggctctttgttttgatagtcagtcagtgcatctatcgggggacgtcgatatggatcgcatcgcttatcctccgaggcgtgtctttcatgaaggaacgccacagagatggccgaggaacccctgttccaggcacgtgtagttagcacattcaacagtctttcatggggtaagaacaatattaagccggggtctcaagtaacaaagaacatttcggagtatgtgtttgatttcgcccaatgaggatggcatcgtgaacaaagaaagcttaggttgaccaatcgccacaatcacatttctcttacgattgttcctcaggaacaatatcatgggccttggcatcagacaaatttgagatcatattgcacggtgttgagtatcgatatcattttcactcagaaacatcaaagagcacatcgctaccaaaataaagaggaagttagacttcgcttgggctaaacaatttagctaatggaaatgtcccaattcgagaataaatgatataagcaatgataacagtcccaaattggcaaatgcaatctccccttaggtgtaaagcggctcggtcacgtcattgagagtcaatcccgacttggcgacgtcttcctcgatcaagaacatcaaaggcatctcaacgagagtacccttgacttggctaagcagctctttgacctgtttcgccccctctgcgccaggcgcaaagtcatcgctcacaacgtggccccattggaatcgcgctggacgtgcagatccttccttgccttcagggcttacctcggtcttgtggaaatagtactcgtagaactccttgtactctgtccagttgcggattgtgtcgtccggaaccgcgtggaataccttccggaagacttcggtgtttgtgtgcgcccgtgagttccaaaggctttgagcagtgtcggcaagcggatcagcaacgatcttgctctcagggcagtcaaagtcgaagttgttgggaacccccacgggctcaaagttcgcgtccggtcgttcatagtcttgcggcggcaaaagtcccaggtgcttccggaacaactggcggcggagagatgaagcaaaacgactggcagtccatggcttaccatccatggtagatgccacaggtgtgaaatcctcgatgatgactgcgatctcagagtcgtgatcacccaattgagaacggtcgttcagatttgcggatccgcaaacaactacacgatcgtcggcgatcatcacctagtgctttggttagaatttaaatcatcgtcgaatttggcgggaaacgaacctttgagtgaacgtaaagctcttcgctcacaaacgcattaatctcggcatcgggatggccatcccacggcactttacgaatatcctctccgttgagcatataacattcgctcacactgtcccaccggcccgaggaagcatgaccgccctgtacctggcgtgcagcctgctggtacttctcaaagggtgcggtagtatcgaaagcactacgggtagtgctcggggcatatccaccagggcccgcagtgttcaaatcgtactccctgcgggcatcctcgtatttgacgccactctgctgttcagctgcagccatgataccaccgttgttaatccgatcgtaattgcgaaggttgtagaaacggatatactccatggggttaaatccttccttggcaatcaacttaatgatacggcgaccaccgcggttgatggagttgtactggaactccataatcgcacgtgttccgagagtagcatcatctcgcaaatcaccggcaaagcagggaacagacgggatgaccacgacaatcttatatttctgaccagcacgggcagcacgtagaattctctccacaattgcggcaccgatctgattttttactggatgctgcgaattaccggtcgcagtgatgaagaactggttctcgatgtagacaaagtgctcactgtttcggatgatggcgcaatatgcgtcggcaattgaatgctcaatctgggtgccattgctccatttcgcacagctgcgaacaatctggcatgacataccccctcggccttgcgacgaggaagggcggccatatgtgaccagtcgatcctggtattggtgaatttgtccggcgagctgaccacgaagggaggtgccgtattgggtcagatcctctcgcaaccgacgaggcgcgaagcctcgatcacgaacaccgaagtggctttcggtcaaccccatgcgcttctcgactccctgctggctttgactgtctacgcactgcaaacccccatcgaattcccgtcaagcgataccgagtttaaggatttcgttatcatcttgactgcatgcacatcacgtcagagccacggcatagttcgccagatcccagctgccattgtccagagccatccgtcagctgagacgcgatttaagctcatatacaagatcttggaagatgaccatcttgcctcggcgcgggatagcgccatcgcatggctgaaggatgaaatactccgcagtccccaatctgccgacaatatattccaggatcctctctacttctgggctctactgccggctcttttcaaaccggtcactgccgccagctcatcatccgatctcgttgctagctggtctcgtctaacccaaattcaaggcccaccacttcattctgcgttgaatctgtattacttgctgctttcctcgccatcgctacgtgaccggctccagctcgacaagacttctaagttcttccgtaaccatgtcctgaaccctctcaggcaagtgttccagagcttcgaggacgatctcaccgccaaaggaggcgagggtgttattgaagctgcggtgggcgaggagatgtgccagattggcaatgcacggtctatcggacttattggtcttacactagatcaaatcgaggagacatccagcgatgcatttggttccgatgaaggcgatctgggcgaattttccgaggctgaagaggctaaggtgtctgaaatccggaagaaggtggatatctgggaataagtacagatccaggttccttgtacagaatttagtagatatgatgtttctacgaatgaacgctttcgtcaccttgtatctaaatttaatcagagtattacgtagctgatgattcggtccaacataaggaagcacgaggcttgccccctgtagaccttttcctctcgatacagttgagctacaagaaatatctaaggaagaagattccttgaggcaatgatccattcctgtcaactatcatgaccgattctaactaagaaataaagccttatccacccaagccacccccgaaacaagaaacgaatccgcaccacattgcaaaagagaaacacaatcaaccgactttaaaaaaatatgtaatgtgaatccccggatatagttgaaggaacggaaaagaagttcctttttaaaagaaacgttgtcacccgaatcgtccacgaaaggttcgaaagagcacaacaaatcggagtcggcagtcgtgaagaccatcggaagaaatgagctgtctcgtcgaagaaagaatgaactggacagatagactcgcaaagagtcttcacaaaagcaaaagcaaagctgagaggtcatgtttcgaggggttgatatttttggttgaaaagttgaaaggagtctcaagagtccgcggcgaagattgcgaaaaaaaaatgatgcatttcaatgtctatcatggtgaccaacgaaccaagtcaggccatggcggttgatggaatgttggaattgggcgctctcatggagggtgtttagaagtcagcggctattcacgaagacatgtcagtatataagtcattattggggaaacaaatggtactcacggttcatgacgacgcagccgccaccgggggacttcatgacgacgcagccaccgccaggagaccgcttcatgatgtcgcagccggctccgggggttctagtgaccacgcagccgttgggaatgggagacttcatgacgacacagccaccaccgggggacttcatgacgacgcagccaccgccgggggctattgagatgacatgtcagtatatgaatgtataaaagagatgacgaagcattgcatgctttggaggcaagctactcacatcgcttctggacctgagcacgagacattttcgaagatcgagaagagcttaagaagctgaagattgaaaagattgtaggttgtttaaatgagaatgtgagcgggtggtggaggaaatcattgaaactgggtgtagaagatgatacttatactcgacgagggactatttttcggactatcaatacaatcgagatcctactcaaggagtggaagttaatgcaagagtcacattgagttgctgacttgaatgcattgggcatccatggattgtcgaaggcatagagtcaatctagaatgcatgaggttccgattgtagtggatgcccattgcggggctggttgatattgttctcgggttcatgaatgtaggcgtcgttgcctctggaattggctctttgttttgatagtcagtcagtgcatctatcgggggacgtcgatatggatcgcatcgcttatcctccgaggcgtgtctttcatgaaggaacgccacagagatggccgaggaacccctgttccaggcacgtgtagttagcacattcaacagtctttcatggggtaagaacaatattaagccggggtctcaagtaacaaagaacatttcggagtatgtgtttgatttcgcccaatgaggatggcatcgtgaacaaagaaagcttaggttgaccaatcgccacaatcacatttctcttacgattgttcctcaggaacaatatcatgggccttggcatcagacaaatttgagatcatattgcacggtgttgagtatcgatatcattttcactcagaaacatcaaagagcacatcgctaccaaaataaagaggaagttagacttcgcttgggctaaacaatttagctaatggaaatgtcccaattcgagaataaatgatataagcaatgataacagtcccaaattggcaaatgcaatctccccttaggtgtaaagcggctcggtcacgtcattgagagtcaatcccgacttggcgacgtcttcctcgatcaagaacatcaaaggcatctcaacgagagtacccttgacttggctaagcagctctttgacctgtttcgccccctctgcgccaggcgcaaagtcatcgctcacaacgtggccccattggaatcgcgctggacgtgcagatccttccttgccttcagggcttacctcggtcttgtggaaatagtactcgtagaactccttgtactctgtccagttgcggattgtgtcgtccggaaccgcgtggaataccttccggaagacttcggtgtttgtgtgcgcccgtgagttccaaaggctttgagcagtgtcggcaagcggatcagcaacgatcttgctctcagggcagtcaaagtcgaagttgttgggaacccccacgggctcaaagttcgcgtccggtcgttcatagtcttgcggcggcaaaagtcccaggtgcttccggaacaactggcggcggagagatgaagcaaaacgactggcagtccatggcttaccatccatggtagatgccacaggtgtgaaatcctcgatgatgactgcgatctcagagtcgtgatcacccaattgagaacggtcgttcagatttgcggatccgcaaacaactacacgatcgtcggcgatcatcacctagtgctttggttagaatttaaatcatcgtcgaatttggcgggaaacgaacctttgagtgaacgtaaagctcttcgctcacaaacgcattaatctcggcatcgggatggccatcccacggcactttacgaatatcctctccgttgagcatataacattcgctcacactgtcccaccggcccgaggaagcatgaccgccctgtacctggcgtgcagcctgctggtacttctcaaagggtgcggtagtatcgaaagcactacgggtagtgctcggggcatatccaccagggcccgcagtgttcaaatcgtactccctgcgggcatcctcgtatttgacgccactctgctgttcagctgcagccatgataccaccgttgttaatccgatcgtaattgcgaaggttgtagaaacggatatactccatggggttaaatccttccttggcaatcaactccatgatactgtgacctccgcggttgatggagttgtactggaactccataatcgcacgtgttccgagagtagcatcatctcgcaaatcaccggcaaagcagggaacagacgggatgaccacgacaatcttatatttctgaccagcacgggcagcacgtagaattctctccacaattgcggcaccgatctgattttttactggatgctgcgaattaccggtcgcagtgatgaagaactggttctcgatgtagacaaagtgctcactgtttcggatgatggcgcaatatgcgtcggcaattgaatgctcaatctgggtgccattgctccatttcgcacagctgcgaacaatctggcatgacataccccctcggccttgcgacgaggaagggcggccatatgtgaccagtcgatcctggtattggtgaatttgtccggcgagctgaccacgaagggaggtgccgtattgggtcagatcctctcgcaaccgacgaggcgcgaagcctcgatcacgatcaccttcatactggtggtagtcatcaattccacgggtgttggagtgggatgcttcctggcctggtgggggtgggtaatagggcgtctgctcctgttgctggccatgatagggctgatacgaggtgtcggcactggattgcgctggtggtggaccaggcggaggaggggggaatgagttcccagtgtagctgtactggcttgcgtcatgaccctgggactgagcggattggggttgatagcccagaggggtttggcttggcactgggtggtaggttgaagcattctcagcttggtacgagggagacgtgttctgctgctgatattgatgctggtttgaggagatctgagtcggcgatggcgcataacctgaagtgctagcactggtgtgaggctgatatacgccggcaggttcttgatgctgaggctggggttgagattgcgagtgcgactcctgatacgaactcgacgaagtctgacccggtggcggcgggtaggtaggtgatgcgactccactgggcttctcttgccaggatggcacagttgactgaccctgcgtgctcgcctgccccgaggggtacacgttggactgaggctgggtctgagattgcgagtgcggctcctgatacgaagccgacgacgtttgacctggtggcggcgggtatgtagatgatgatgcgacttcactgggcttctgctgccatgatggcacagttgactggccttgtgtgctcgcctgtcccgaggggtacgagttggactgaggctgagactgggattgcgagtgggattgcgagtgcgactgtggctcttgataagaactcgacgacgtctgacctggtggcggtgggtaggtagatgctgatgcgactccactgggcttctgctgccaggatggcgcaggttgctggctttgtgggctcgcctgtcccgaggggtacaagttgggctgtggagaagcagcctgctgttggccagtcgagtaagcgggccttccatggagtgccagtctcgtgtatctagattcattgcgaatcttgtatttcaaatcatagatgaaattccatcgctccacaaagtgacgtcgcaaatcttccacggctgcaccgtgcaggctcacggatatatcagaccatcccatccgagacatggtctttctgtccaactggttattctcccaatggacaacatcttcgaaatcaaggacgcgagaattgttgtagtcctgcccagggaacacagtctggttgacatccgagggatgtagatccgagaggttatgttggtttgtgtcccagcgaccgaagcacaagtccaagccacccatgaatgcaatttgaccatcgatcaggcaaagcttctcgtgatgagcccagtacagaatgacatcatcgcgcattccgtacagtcccttcaatgtgtcctttgacatcttactcaaacttttcgagtcgagtgacaggttctgcaaggtcgactcgatgtcagctgtcatctcctggcggtcaggcaggtggtcagggtgacggaagacagagatattggggtgcaaatcttctagggcatgttttgtgtgagaagaagacactgtagggactgttagttggattcttttcaatgttcaagaatcatggacatacgagtgagcgcctgcgtaacctccttgtaaacgatgacattgacgcgcacgccccgctgggctgcagcctgcagcatgcgatccaatcggtactgttcattcttcgccggtggccttctcagataaagttcgggagataaccaccctacattaagttagccgcatgcaatgtaaatccggggaagattgaaactcacagtccagaatccaaatcgactctcgggcgttttccagagcccgcgagacagcccagaaataaccgcatccatccacataccacttggcatcgttatgttcccggacaggggcgaagctatcaaatcgatgctctgtgttggtattgctgggaccatactgggcatacgcctgtggatcgatggtggtaccgatcttctgggcaaattcagaaccaagctcggtcacagtaccttgaagtttctccaagaaatcggacagtttgtcttccttttgaggtttcccatagtagttagggttttgttgctgtccacttgtgctttggctctgatcatatccgtattgcggttcggtctggctctgctgtagagaaacggttagttaatgtaaaaggtggaggagggtgaagcctacgccttgataaccctggttacctgggccggaggatccgtggctcttgtaggtgtcgcggaacttcttgaacgtatcgcctagaccgcgggaaccgtctccggacccacgttccgagccctggtagtagccaccataggccagatcatcctggttggacattttgacggctcaaagtagtttgtagatgcgataagataaagatcgttgaacaaacagaaagaaattcagaagagtcaagaaactaggatgcctgcggagcggggtgcgactgttttaaatcgtatgaaggccccgctacccagcccagccacgatgggaacgtgttggatgtggcggtgtacttgtacgtactcatgagatggcacgattatctttccaagttgggatattgctgtattcctatatataggcaatagaataagtgagactgttagatgtattcttactaaatggcacttatccgagtacaaccgaggatatgtagatatgtcacacacctttccctccgaataatgagctatttgacggcaaaaaaagacaaagaaaacaagaagctatattctgaaacaaggaaaagccctatatcaaacaagaatgagtttcaggttcaaacatgaagccaagtgtacttctgcttttgggaatgcgggcttggcattcggatatccaggaatcccccgaggtccactatgaaccttcataccctcaatggtacggagtacggagtactgcaatgcccacaggccaagtaaaacgaacctctcttgggcgaccccgaaagccagccgaagatgcaaaatccgtgaggccccttcccggcgagtggagatcagaactcggtctcacctctggcacagatacgacgcgcccaggtccgtgaagcgcagcaggcataccgatctcgccaacagtcccagctctcttcactaaaagctcgcgtagagcagctggaagatgtgcttaaccagctgagtcagacggtacatgcattcgataatcaactcatccagcatggatcgcaatggtctcagcctcaacttctccagacagtccagttgctgcgggatgatataatgtcccatttcaagcgtgccgatattcactttcaagagtctacagaggaccaaccctcagaattatcccaggctgttaatgagcaaccccacgcgctggtcgcgtccgaggtgtcagccggcagattaaaagatcacacttcggggtctgacttttggaaattatttttgggctcatctgctggcataattccgtcgactaatacccagaacctggataaccaatcgaatgacttggtttcaattcctgtcgcaccatctatcgccgaaacacataccattcaatatgcaaccacgcccttcacccaacggcttttccgcgcttgcgctgaaagtggccatcgatttctgtcgaatctctcatataaagatgaagatatgtgggagtttggactactgctacaaagaatgccacgagcagagatccaacgttatttcggacgtgtcatagacatggaaccgtgcaatcctatcgtcgatggccgattcccatatgtcagcctcggtggtgcaggaacccattttttacaaccttccagtgactccttttcagatagcttcgccctcttccgaacagcaaatggcgtgtctcatattcctgccgttgaagactggtttgatgtgcatgatgttgagagatacctgctcaacaaaggcattattgcaggcgaatttccttccgcccttacgatatcttatccgtttagtccggatgccaggccttcgaacctagagatccctcaaggcgaattacctggcggtatgatgatggtcatcgacgagtataaattgatcaacagtatggttacactgttgttgttattctcggtgaatataatagaagctaacatagccaggattgagccagcttccagtcgctctgggctgtgtggctggctttcgccggtctgatgtcgagagggtagtatcccacaatgtgaggtggatctcagttggatttactggctcgacagggtaggcatgtgtgcattaatttatttgaacctgcggagtatcacaatttcctatttactttatacacgcaataaatcagacacaatctgtttgtaaccatctacttacccttgtttcgtccaagtcttgcgagttgctgcgacttcttccgttgattatatggccattcgacgccacaattgcaccaccaagtactctagattgagctagagccccagaccatgccggcggaaagatatccgactcatgacctcctcccgccaataccatacagccgccacagtcgcacccggtccaattgccacggaacctagaatcaaaccagccagtgcgacctgccaagagacattggacactccaatgcggtacagatcccacacgctagccagacaccacaggagagttgccaccgaaacaagcaggaaatcgttctggaagaatacgaagacaccgtccgcaagtgttgccacctgtgcgaaggcatcggatgggatgaaggcccttgtaataaaacctgtccccaaagcagcccagctcagcaacaaggccacatggaaacaagcagatacaccaccggccacagcgtagagggtttgcaagtgtgggatgtcacggtttggtttgctctccgctgcggagctatcggtcttggccggtgtgcttgaactgatcgatttgatgacacgggagaatatgtgagtcaagataagcacgtataccggagcgggctgccacagcgcaatgaagacctgtcgcgtgttcggggcatcagccaatgggaagaacagcatcatggtaggcacgacgaatcccaaaatcaatgctggcagtatcgctcgagcggtggattcgggaagtgtgcgggtacttggggaaaagtatgctatccccgaagaaacatatgtgcttgatatgaagaagagcggtgcaatcaacccaatccctcgcaactggtatagaaccgcccacaagctcggaatggcaagaagggtccatttgttccttggtcggaaaccttcaaccgtccagatagcgataatcggcatcatcgagcctaggaagtacagaacttggaatggctgctccggctttgagaagttggagaccgctggcaggaatatagccaccatgactttcaaaatgaggtcaacaggtcggattcctgtgtacacctggcgaaggggagcttcgattcctcccgggagttgaaccgactggttctggattgactggcggacgaaccccattgttccatttgctctgattgctgccgacaattgacgatggcctaaccaggctaggaggaagtatgcagcgtacaacaagatgctcaccacaccccgagatgacggtgttctagaacgctcgtcgaaatatgcaatttctcgaggcctgtgcggcagtggaagcatgtccaaggacactgcgggagaatacgtgtcgatccatttgctgaggacagtggatttggagaagcgtggcaccacgtatcttgctatgaacttcaaaaagggcgtttccaggcactccagacgttgccgggcatgggatactttgatcaatccccatgcacgtttttcacgctgctgttgaacgccctcaaagattttggaaatttctgctgatgacagggtgcctgactggctgtttttcaaggccgcaacgagatgattggtcagggacgcggcggtttccattgcattattgcctccctggcctgtcaacggctcaaactattggacggggatattgttagtcttcgtatgatattttcggagataggtagtctcaccttgtgactggcatcgccgatagtcatagttctctggaaatgccatcttttatagacttattctggcagactgctgtatgccgaggcgattttgctcttatacagagcggaaaattgcagcgtgggagtaatctggtcgtcgaaatgttccgttgcgactgcctcctcctcttccttggtgaatcgagggatatctgcgccatagtacgttttgcccatgttccgcacgagaaaccagtaggtgagatctccgggtccgctgggaacaagatacgagaaatgctcattgaacaccgagttcagcgtgcctttctcgattcccttcactcctttggaaatgccgaagatgcatgcgtaagttgcaggcagatctttcacaatagttagttaacacttctcaagcgcttatgttttgattttcatactagattcctctgtgggatcaaaccatgtgggatctatcttttcggccgctttccacatttcttggcgcactttggaatggattccgtctgctccgaccacgatattcccggtgtaggtctgaccagtcgttgtggtcaccgtgacactcgaagtaccattctcaatactttgaacccgctgagaggtgagcactttggatttatcttggatctttttgtagaggatttctatcaacattcgtcgatcgaggaagacgatcggataaccatgactggaagtgatgtgagttgatgctgttcaatatcggcatatgagagacaaaccttccgattgaaacctcgtcaaggttattgaatgtccagaattgctgtccctgcgaatcacggaagcggagtgtgtcgacagggtattctgccatcttcataaccgactcgtaacaacccagctgatcgagaatgcgaaagccgtttggcaaaactccaaaactggccccgacctggggtgcaatgctgccgtacgcttcaaggatgacaaaatcgatgccattcctctctagcattagggccagcgaaagcccggcaatgctaccacccacaatgacgactttgaagggtttttggttcatgattgatgatcggaggagatttagaatcgaagatgcattgatatcctggaccgcgacttatatatgtcgggcgtaattgttgcaactaacccataatagaaagccgatcgtgtcaaacatctattgaactgcctaaatcggaggaaaaacgtgccgtgatcattgatcaacctgtcagccgggggaattacttgaatgatcaataatcggacccataggagtcaggcggaactaattacggacacggtgatccactatattattccatgattctattggataatcatattgatctacaatgtacggagtacatacggagtagtcgagaagaattaaaaagtacctctacctacaacatacaaagtccattgcatcaccagactgcgcaccggccagtcacagaaatcgtggtgccatggcacacgtattatgccttgtagggctccatcatgctaacaacgccaatcagccttcaaatgccaagcaattactagaataggtagatacatgtacctagtgtaactcacttaatagagtaacctagccgggtgaaaatccagccgtttcaattttcaagactactttgaatatgaaagaaagataattcattgttcagtatctaaatcagggaagtaaaggagaagaactactacattgtcctctttaccagatgattttctttgggcccctcactggatactgttggtctttcatgtgcttccatgctttgtgtctgtaaaattagcccaaccaaacacatttattagaagcctttgagatagaagcattgccttgtactttttgcacaaagctattcaccccccagtttatcagggctcgaatacttaatggacagatgccacagttccgttaacgctgaagagtgggaggaacaatcacagacatggatgcttggagaatctacaaaacctacagaatggagatacaaagagaaagtgtggatgatattctaggtaatcgtatatagaccagagagaaagagggggctatctactacaaaggagatttaactagaggtaattggcgtgcgccgttagcgataatgggacattccagactaattgatgctatgtatttataaaatcttcaccagcaccaaaatgtggactaccaatacagccgcaatccaatgctctccgctaagcaaatctcacagtcgcccgtaagggttataaggtagtatgtccgagtgctgatcaaggtaatcgtgggaatcatcaccactaagtcctcggagattgacaggcgcacttgtaaaaccctgttggccatgtctggatatccaccttgcccaaccaatgataagcacaagcccaagcccaataatgatcacagcgatggaatatcctattacaacggacttggacgcagatgaccaagtaagtccgatgcctccgttgacgatcgcgaggaagatgatgatatgtccaaagtagcgatggataatgccaaacctggtaggtgacttagtctgtttatatacccggtgatgccaaaatcccattccccactgagctagcattgcaagcagaaggataataccaaggatctggtgcgcggagccgtagttttgcgattttgtgaacatcgtgcttaggtaaaagccgattattatgccgacgatcgcaattgctgaagaaagtgtctggttgatccagtgccaccggacacttttcggagcaacacggaggagaacgacgccggctggcatcagaaggatgagagctccacaaaggcacagaccgtgaatgatgctaggccagttgctgtcgtttgtaattgatttgctcagcaccgagccagttgagtttgtatacgacgttggtagtccacccgaaccgccggttgcgcggaccatatccatagtgaagatgcctaggatgtcaaaacaaattagtgtccaggagcccgagtaaataccgttcaagtaagatatcacgaaccatattctgagtgtctctctatgtttgccgtttgagagttactgcgtagcatggcagccgaactaccagttggacctagcccaaaaatccacggctgagacgtggatttcaaatccaatgatccagtctcccactgggtgcagtttgagcacctagcattcacggtcatgacgttatcggagatacctgtaccattgagaatgtccaccttgatcgaagatgaatacacaggttcttgttcaccggaggagagacgagggctgaaggtaatatctaaacaggcgcgtcaggattgtcttctcagaggtatttgggtcacgtcaactcactttccccattggccttggagtagatcacaaacatgagagagtctttcatttcatttccagtcccgaccgcaatccatgaatagtccgtcggcccagacatgtggaagtagagatcggtggagccatcggggatgttgatagcaaaaatgaaattggcctggttctggctaagaggcagattgaaaatgctcgtagtagtcgagtcggacacggcagacgcaagggcaatagagtgaaataaatggcctgttaagagccagtgattctgttagataacatgtgaagcaataccaaaatggctaagcatcgggacctgaccgacctagcaaaatcacgacttcgggccttgtaggcagtcgcatgttggcaattgtaatctccctgtatgtcttggaaaggaattgaaaataccccaaagtgacacagctctaaattgatttcatcttccctctatttgacttcactatatacgtattccccgcttatctatgagtgacatctcgccttaacgtgattggcccggccagcatggtctgggcgttgaaaagggaacttgtcatttcctagggtctttttcagagtggatgcctggcactgccaccgtgatagtggagtttttggcttgtctaactagtataacgtacctattgttgttaggttccaggattaactgttttaactgttgtatgttccattaggggtttccacggataaatagcttatccggtcccacgatttattttaatgcttgtactaacttgtttaggcaatcttcaggtccccacatagccccacttccttgtgctgtcatatacttgtaacatcaaagttacacatacaaatgaggtaacacgtatgattcagcttcaattctttcagatctatgagaatataggtgaaaagtgactattcatcacacaagatgtatttcgtagatgtaaattttgctaggtagacggaaaaagacggaaaaggcttgattgtacaaccttgaatgaaccatagttagacattgccagtttccccgcagtacatctgtctcataacatcatcctcgattgccaagcaaaaatcagtcattcagcaattgaagatcatttacctaaatcaatccatcatgtctctcgcaaccctacatgtgagaatgcccattgtcaacccgcaaccccgctgacctcaatccagaccacagagcactccaatctccccgccgtatccacaattctcttcaaagccaaggcagcccacaagctgagcttcgaggaaattggcgagcacctcggtcgcaatgaagtagccgcagctgccatattctacggacaggccaaggcatcgcccgaagacatcgaaaagctggccgatctgcttttcatcccccagcaggctttggaggatcacctcagcggcttccccgatcgcggtcactccgtcgaaatgccgcccaaggagcccctcatctaccgactgtatgagattgtgcagaattatggttatgcctacaaagcggttctcaatgagaaatttggagatgggattatgagtgctatctcgttctcgacgaaggttgagaaggaggttgatgaggatggtaatgactgggctgttattactcttcgtggaaaatggtaagagtgtcttctctatgtgtgtgaacatcatctgacgaatgaataggttgcccttctctcggttctaggctgaaggtgttcctaggagctattgtattcacatggtttttatgactcccaacaggttactcctccaagttcttacttttctataccatcagtgagagaagtgcaggatggtagaaaaacgatagtcaccattctatcaagaatttagatatatctgacttcaggggaccaagtaaatccatctgagacagctcattgatgtatatgtagaaacctgtgttcagagttcatgtgtgtagagttacttaggagttagtaggaagcgttcagacagtgttatgttggttcgacctcaaaaaggcaaacgagcattgagataggaaagaaggaagaacaagaaaaaaaggaaggaataaggtatgggaggatcaacatcaaaaaaaagtccccattaatctagaccgttcctagacctcaggagggtatgtccaaagtacaaagtgcaatggtccatggtcctctcctccggcctttcccctatatgcctccactgaccgtactaactacgacctcccccctaagtaacggtggacggagtgccatgtccattcccgcggggggtttgcctagcacactgcttgcagtcttcgggagagctttagcatataggagtccgaaccgacagtggggagctaagcagtacccgttaaggcgaaacgtccgttgggaacgtaacgcccgttgagaacgtccctcgcaagggacgacccggccatactaccgctgggccactggggggggctggttgtaatattagtctttgtcttctttacataggacaaaaacttaaggaccaagtcacttgggatcttagacctccgatttatctgccttcctagttggataggagtttcaaatttagtacatagcatctacataagctgagctgtatataggctaacttttgagagcatctaaacatagaaaagtggtggttggcagccatttcaactctcgggtacatgcatatcaagtcaaaaatgagggtattcagacacccattttaggaaggcacgactacggtgagagctggctgaattctcaaagtcataggatcgattcccggcctcgtcaataaattcaatgcacttttttggggtttcctacctttttcccactatattgcccaatatcagaacaccatgacctccaaggctcttccgcatatgcttccacgaaagaatcccactttgtcaaagagaaatcaatgtttcgtttgcctcccaacgcgttaagattccgtctatcaccttcttgcttttcccctttcatcgctcttctagtattctggttctttcacatttctttccttctccaactatcttcatatcctatctatctcacttcatcaccttaaaggttctttacaatggccgaagaaccagaggaggtgtcttgtaccttccagggctgcagacttagcttcaagtctgccggcgagatgcaataccacaaggcgaatgcagacagacactcttactgcatgaaatgtgacctcgacttccagtctcagcaggccctccatctgcacaagattatgagcgaccgccactttgcttgccccgaatgctgtcttgagctccgcagtgaggctggtctggaagtccatatgagaaacgtgagtcgccatcctttatggcaacctccaaagaaacaaaaaaacagtactaacaaactcatcttttccagaatcaccaggaaggacgtgaagtcgcatgcatgggatgcggttgcacgtacaactccgcttctgcagtcatcaagcatatcgaagacaagggatgccccgtccttatgctgccagagaaaacccgcgatgccactagccaggaccttcccagcgcagcagcaattctgtccatgggtcgacattcgcctggaccacagtatccaccctctgaagcctctagcgaggaccaggacacggatggtggcgttccgctggatttctctacgcctcgtatggaaggaaagcgccctgctcgcgacactaactatgcaagcttttctcttgatgattggcccgagctgggcactccagcgactccagtcaaaggcaaagaaggaagtagctccactgaatcgtccggaggtgcccgcctcgatgatcttttgagttacgacagtccttccccgtctcctcgcggagctactaaccagtcgagcgaggctggatctactctggctgttcaagaagcaggcccttctcaccatactagatccactcgtggccgagctacagctcaccgcaagattcaaggtgtggaccctgagagcttctggaatcatgagaaaagtcgctactactgcaactgtggtgcgtctttcttgtacctcgccacctttgagtatcatctcacgatggaggatgaaacaatcagcgagtaagtatcttcgtttctatccgtttatcttgtgaagcaattctcactaacgatcttttttatagttgccctcgatgcttcaaacgattcaagactcttgccgcgctcgtcgctcacatggaggctcgatactccaagtgtgctttccgtgtgaccactggccagattgaacaggagctcagtgaagttactcgtggctttgccgatatctcgcggatgattggggatgatgaaacggagctgggcgagatcgatttcgatgtgagtagccagcccgagaacaatactaccggggcttcggatgcagacgccgcatctctgagtgcagatgatgtctctttgaacgcagtggccatctctttggatgcagatgacgttgcttcaaacgcagcagctgtatcttccaacgcaggggccgtttcccctaccatggaatccctagtgagtgattgggagggtcttgtcttttccgatgcacacgaagaaaatgacaaggaggacccttgaggcgaggtttgggattgagaacaggggtgggattttgaggatgagctttgaggatggtatctaggggttattcttggagggtgagcttcaagactagctgctacggttctacggattgaattttactgatatcaaggaaggatagaaggggaatctccacttttacatagtttcatagcacaaatcaccttgatcaaacttcttgcctggagtagagctagtatgcagcctctgggactcaactatatgaatcaacaatgacagtacaggtactacggaaaacaagatcagaaacgagactggatttcaatttgctcagctagaaaatggaaaataaatatgtaaaagttgagtccggactccatcttcacgcaaaggctccggcaaattgtcgagaacaagagtcataatggctaaataggcatatagagcatagaaaagcatataaagtagagcaatattacccatcgagcccggctagtccccaccctcgatatcccccgtcccaaggaatcaatcaccggacgaggcaaatacgcaaaaccatcgagcaagagcaaggtatcgagtatatcgaggggatcaagccgatagcgtgctagaacgaccacgcaactagcagcaacactcgcagcattcacagcattcgaagcagagaagaccggcgcaactagatgattgtcagtttggcttggtaagtttgtggtccggacgcatttggcttacaggccgcagcagacatcgccagtgccgccaccacgcagctccagcttcagcatgttctcctgggagttctgggaggatattagtctggggttttgtgaaggggagttgtgtcttgtatggcatacaggctgctcggttaccatggggtcggtggagggggcctttgggctgacgggctggtggttctcggtgcctgttgtggcatcgctggtggaggttggaatggactccttgaaggagaaccaggagaagagactgttggcaaacatcttaattgtgggatggagatgggagatttagagagatggtgagtggaaggggaggggaagttcaatgggggaagtaggtacctataggtaagctctggtattggatttgctaattgtatgacctcgagctgactaccaatagagtgggattgtctaccttgccaatcatgtatcaagctgaatttagatccttgttcttatgttatattcaatatttaatatttaataaacttgaagtatatgtggttatgaatattttacacagatcccggtgaatcccaagcgtagtatgtacatgtacttggtgtccttttgtatatattgtgtctttcccttctgttgtagtcagaaggagtaattcactatattcaacaaaattatatgtcaacatctatgatctatgtgaatccaaaaatagccttacgacgatcaatccgatgccaagtatcgtgccaagcccaaccgccaaccataaattttcctccaaccgcagcctccgcaatatcatcgacctcagaccaaaccaaaaatggcaaccccttcacccacagacctaaacgcctcccgcgaagcagactacaagcgcttcaagaactatgcagcctacacattcctaatcggtgcaccgatcctaatcgccctcccaccacgcaaactcgaccctctcaccgtcctagtactctgctccttcggcgcgtccgccaaccacatcgtgcacgaacgcacaggacgcagcataatcgaccggattgacgcgcgcatttccagcatgcagcgctcattctcttccctaccgagcgagcgcgcgcaggagatccaggcacgactccgggccgcgcgggatgcgcaaatccgcatcgctgagcatgaacagttgaaggcgcggattttgtcgctttcggataagcagcgccgggagccggatccggttttgatggaggagattcagaagctgaaggcgagacaggcgcaggaggaggacgttgtgcggcggctttggatgggtggggagtccgaggggtggaaggagaggagattgagggaagagcagaaggcgcttagtgaggggaagggatatggggatttgattcaggaacatatttgggatgtttggacttggggtgggaaggatgggaaggctggtgagggtgttacggatgagaatgtggctgagaagaaggattgagttcttcattctgcggtttatgtctgttttatgtgtcttgtacagcgtctctgcctctctccccaccttgatgtattatattttgccctgctttgcattgggataggtgtttggttgctttttgagttccacctgccaggaatttatcagtctgttcgtgttgggatgtccgtgtacaatacattcattcgaacaagctgcaattgtctacaatatgtatctactctagtattctagtgtatccccatcccagaatgtattagttacctgacgtcgaaggccatcgcctatctcgaaggatcttacagccagtctacggcatctacaagcttacagaaaatgaaccaagtggagaatgatagttctttatttcaaaatacatcttcgaaaaccaagagactccccacgaccatggcatcgcgagagactcctgatcggtacatgatatcccttctggaaagccatgagaccctcaacgaccatggcatcgcgagactcccaagccaaccaaatttagtacaaatcctctcatatccaataaaacaaagtatatccctcccataaacaaataaatgaaacatgaaatatatgcaaaacgcccaaaacagatggtataaatggcaagacccctcattcgagccgtgggatgaagatgagcggctggtttcttttgatgtagatgctgatgctgatgctgatgctgatgctgatgccgatgttgatgatagatgttgttggtcttcacccgacggggccatgggaaaatccggcaaactccttgttgggtgctcggtaaaaaccatggtcaggactgcactctaagtacagcttccttgatatcattcctccattgcacatgtacccattcgaatccttttcctccacgatctggccctccctgcagacggggccggtgcgccatctgcaccaggaccagacgatgtttgtgatgtgtcgtctgtcgatggagtcttccgcgccctactctgggtgggttgtcacccgtctgtgacggttcgtacccaatatgaggaacccagagatcttggggctgattcggaggtcggtgaatggtgaccgatgtgggaaagtgtgattccgttgttgatgtcgacttgttgtcttttcgtgaggcgactagagcagggttggctaagccgctgtctagtggagctcagttggggacgaagctaggatccaattcgctagctagtctgagcatgctctcggcctgttgtaaagttagagaaagtagttacattcagggtttccttgcaactttggagaactgatgactttgggatgaaaagctggagggtggaaagttgggggacggaattcggggggacggaaagcagagtgatggacatcaggttgatggaaagcatggggattgaactggaaattggaaagtgggggactaaccatttccttgattgcaacagcacccagagcgagggctttgattctctgtaaagaagttagtgcatgttgcagcccatgtgccgcttcccagagataactcactggatcagggagcactggatcgggaagagctggagcgtcgggcatctcgatgtcattctaaatccaatgttagcaatcgatcttcgacaagatggatttgaatgtatcaacttactggttcatcggatggtgcatcgtccatctgaacatcaatgtttgatgggtgaatgtcgaggttgtaattttcgttctggttgcggtaggctagacgtctccgattgccatttcgagcctggccctattatatattgttagtatcaaatcaacaatgcgtcgaggggacaatggggggagtacttacaacatttgcctgggcaggacgagagaagctcgggttgtaattcttccccttgtagttggggttgaagttctttcccttgtagttggagctccgctggttgttctcgttgccgaacccgtcgcgagaggtgtctcgctggttgttgtaatcgtgggtgccattgggattgccattgcgagggctccattggttgttggcgttgccgttgtaattgttattgcctcggttgttccaagaacctccgttgttctggtaagctcgtggcccattgggcacaggagatgggccattgccattggcattggcattgcgaggattggcattgcgagggctccattggttgttggagttggcattgccattgtggttgtagttgcctcggttgttccgagcacctccattgttctggtaagatcgtggcccgttgggcacggaagatggttggaagtgcatcttcgtggggttccgtataccaaagttatttttgtttggactaccgcagcctggtcccccggacgagtttcgtgcaagcgaggtcattcgattgaacttccaaaagccggatttaaacttgtaagatgcccgcgaacctctgtttttggcttgtttctttcccttagcgtaggcttgtttcttctcgacccagtgtggatttgtatagtggatttgtttggggaggaattggttttggtttttggttttgccttggctgggatacttcacctcaagaggccggtgactatctccaagtccgacagttaaagacaactccctgaccttggcaacttgcgacgaaggctgggcgatttgatggagtggaatatagatcttcttctttgaacgtgggagggccgagccgtgtggctggttggaggatgtggttttcggtggcctgccagcggccaagtgaggtttatatgccggatgaaagaatgtatacccaaagtggaagggtataggccccaaggaggggatgaggagcacttgcgaggcaaatgctagatgttgtgagatgatttttgattattggagtatgccgatgaccccagtgagaggtgaagaaggaaagaaacgagacgagtcggggggtgggcagaggggcttttataacactcaagctagatgtgctactaagccaatctaggaacggagcttgcttccacggtgataatatactcaattccttggattcgtagaaggtaaaaaaggcctagataaggcgagttgatatgagtaccatgatatataggaggcaggccggtatatcttgagcctagagcagagccgaactgagttaaaaccgaacaatgggccattgttaactataaaggcagacggacaaagaaccttcaggtcttcaacttcggctcgaccatttcgacagaggtctttgggacatctcatcagagctccgaagcctaggatggaatcggcctgtagttgtagagggcacatagacatagaaacacacatgtttgagtttcagtatcctgccttgtcttggaacccagacagagcaaaagctttgaagtgtcttgtgattactgctgaactcaagtcgttctgctgccggagaatagcggaggaatgatcgtgtcggagcacttaatcgaggtgcggacaacattctgtcggcgtatcacgggtcaaagagaagccaaagagaagtcaaagagatctcgtcggaacaataaactcaaatgctttcattctttgggtatttcggataatggctttcttccgagtacaaggcctttgatatgtaatggatgcccagtgcgcatatgtcatcgtgactgtacacctgggcaactcgaggatataagaaaatctatgaaagaaggaaaaatgtaaaacgatcaagagggagaactcatcaagccaattaccatataattccttggaactatgaacttgacctcggactataactcacttggacctttcaaacgaatagacaggttaggatctcaatatttctaatgggattcacgttcgaacacagttcttccgttttcactcgtgttttgttcttctgggccaagtttagggaagatggaagtatgatcaggccgatgagagactagaatcatatgctaatgagctagttatatcccatccagaattggacgttgcgcattgcagaatgttggcaacttcttgattgaaacatacgagagtagtcggccgcttatatgtctttttggtagtgttttctccccttctcggtttgaacagggatcagttagaatttctaagaatagtttcagtcacactcaatgaagcatcatggccgctttctcgaacctttagaatccgccaatagacgaagcacaagccctagagaaacaaaaggagaccagataaagaccagcatcactcatggtctccctcaaagcattcattttaaggcgatttgcgtcgtttctttttatccgcgtcatccaccaaatcaccatgtctcttgtgcccattctccagccttagccgtttcttccgaggcttgcatgcaatttgtgattcaccgtcattcgacacgagactgtcgcgcttgcgtttatccgctttggggttttctttcctaaaacgttgctcctccttgattttcagccgtcgctggacttctgctgagatatcctctgttccaagccacgtcgacgtgaactctccttcttgctcggttattggctgagaaggagattcacggtgtctcttgggggctcgttcttcttctgtggggtcaggacgggctgtgtcgttgtcccgagagattctgcgtctttttttgcgaatgttcgcctctgtgtcagtggattgtgtggggttggaggaactggaggaactggaggctgggagtgtagcgttttctaaggctgtcatgtcaatttctgtttttattgcttggtaaaggtggtgtaggttgctttcttgcgtctggggtaggagtttgataggacttactgctcatctaaagaagtgtcagtcagttatgggatcaaagaaagaaaatcgggcactactcacaatatgttttctagctatcttcagctggttcatcgccagtactgttttgttcaccattgacgagacggtctggaaaccattgacctctggagcaatctggtccttcaccatgcttagcatatcaaggtgagagcagaggaaggcctcatgacgggagaagatctggtcgcaaagaaagagccggtcagttacagtgcgcctgagaatgtccatattttcagtttgcgccttgcgcaacaaaagcgtacctctgaccaagggactggcgggtcatttgcattggacttgatctttgaattagcctttaaatgggcatgcgaatcaccgacgacttcgtcctccgctgtaggattcatggtgggcttaaagttggcagtcatggtgaagttgaagatcggcagctactccgcgccaagagttcggctttgcagatgacgcgcttccgggctttaactacacgacagagagtaggaaagagtagaagagagctattcagttgtatatctacctaggacttgttattcaatctgattctattgtctatattgttcgtttgtgtattgtccctatcccactcggtcctctgatgcgtttctcttaggaaagatgcaaaaagaagcgaaccacttgaaggtgaccacggcttcttgttattatttcaatctcattgtacattaatcgcaagctccgacgccattcatccatgctcaagacctaatcatatcaccataaacccagctattcaagaaaaataagtcatatagcggagaacgctctctcattaccaagcaccagcgtcaaagtcaaatcgggacaggtctttctgtgaatcttcgacatccttctttgctttcatgcgcatgtagaagatcggacagtcacgggatgagcagatgacctcacagtgaagactaccttggcaccgctggcactgagtccacagacgtccgaatcggacctctagatcagagaccttggtgagggtttttgtgtaaagttcaccgaggcggggacggcagttagagcagacagcaccgtccatctcttccttgctgacaagaggcttcttgcagcccatgcaggtctgggtcttcttagcgaacttcatcagtccgcccaggtttgacgccgctttggtgatagaccgtgtgtgctcgccagtgagcaactggcccgccttcttgcccaatatgggttcgaagatacggttgagtgggtttgtcagctggttgtcgaggtagtacttagtgtcaatggggatgttgttttccagaacgtagatgggatcttctgctcgttcatagcccttggaatcacccgcacccttgatcatgacgtaggccacacggtcaccaagtgttggcgcagaacctgcgtcacgcttgtgcatgcgttcagcaagttcgacgtgtgcctgcttgcctgcgtagtcctccttgcgtttcgacagcgcttttgtgatgactagtttcgacatatcgatcttgttttggagcagatctgaaatggtggatttgacgtagctagatattatgttagtttcttgatagctttattttggggatatatcaacttactcttgcgcaccatcaacatctcggtcaatcagaattttgttcagcacggtttcaatgacattttgaaccatcaggcagttatcacgccggacggtctcaataccctttgtgtccatcttgtcaggtttgtcggggtttgtccagtataatccagcgtatcgcttcttgttgatcaaaagataagggaagtatactttctcgaattcaagcttgatgggcgcaacgaatttggaagaaacaaattctgctgcttctcggccaagcttcattgcatctgctagttcagtgacgccaaatttgaccatgacggagtcggtgtcaccatagatgacttcagcatcgtgagagtaaccgttggcgatggtgtaccgtgattctacctcttgttttgtcttctcaatcatctgacggccgtaactcgtcgtactactggcaatgggaagacaaggcagtttacccactgtggcacctgtcagaccgtagacactgtttgcgctgaccttcaaagcgagttgacgaccgttcagcactgcctttttgaaagaatcggtttcggtagccaactccttcttcgcacgctttcttgccgacaacagctcttcgagaatctgggacaaaagtcctttgcgaactttggtggtgcaaaacatgtctccattgggagtgacgatgtaatcgtcatccttcttcatgttcaacttctcaatactactcttgttgagcagggtcgtgtagcaaaggttgtgtgcttgaatgattgaggggtacaatgatgcgaaatcgagggtcgcgacgggcactggatagtaccctcgcttcggctcgatgacagtggcaccttcgtagtcctgctcatcctggggcttggaattgggaataacaagttgctgctctcgagctttccggaaaagttgactgatgaacttgacttgttgtcctcgagacaaaaggaaattaaacggtacgcccgtaactcttgccatctctgtataattgaccaggcacatcaatttgtccattaatcgttgcggcagatacgcatctttcagacagtacactgccagtcgtcgtctcgaatccggggtaccgttgaacagctcagtaatcatcgtgtggtgaacgtcttccttttgctccttcaaaaactcccaggatacggaattaagggtataacttctcaactggtgatctctctgaaccaattggagaagatcaagctgaattctgccgtttgtattcgtctccttcgtgtctcgattgcccatttgcttgctcgaaaattttccactcttaacctctgtcttgaaacctttcaatctggtccaataggggaacccagtgcatttcaagtgcttggcgcgatcgagtaggtaggggaaatcgaagttggcaatgttgtatccgataataacgtcagggtccaccttttccacgaaatcgcgccaggcgtcgagcatcttctcttccttctgaaattccaggatttgggtattgacgatcagactacaggtatcgaggacaaaaacgtttctgatgaatggtttcgtctctccgtatcgagtaacaacattggcgatttggatgacggggtccacgttaggctctgggaagataccctttcgtccggcacactcgatatcaaaggagagaatgcgaagaggtgccattttagcccattccccattgggtggatgagccaccatgttgcgatagtcgacagaagcttcaatttggcagttggacaatcgttgactctgtccaagaagacgatatttcccagccatcgcctcgacccaagccattccagccagcccagtgtcaatcatgaagcgcaaaaggtattggatattgtcgaacgtgaggattccatctccacctgtaccggtccacatacccttgtagttcatgcttccactgccagtctccaacgcacctcgcaatcgagcggccaatttgggctcagtaaccgtaatcttgatataataactcttttggttcccttgaaatccgtagatgttctcgcgcattgtgagctgcacagacgagattgcagtgaagccctggcctagcttttgctctaggaaatgtttgtaagggtcgcaatcgtctttggtgaagctgacaggagcagcgatgtagaggtaatgttcaaagccggttacatgaaggcagaccgattgtcctctctatgaatattgttagatacgaaaactcagctggtagcgaatatatttacctcggtaacaccaaagagccgaatggcaggttttcccatcaggaatgcttcttccgcgtcaatctgctggaaacagatgttttccgtggcttcgtcgaattcaccaagcgggggacgctcccattgctggtctttctccgagttgttctccttcaagtcgccgatatcctgcgtcaacttttcgagcacctcctcctcgaattgacttttctgtggttgacttgagccaatctttcggcgactcatctgcgatgatggtgtgaactgtacagacggttcattgtcgagtttccgctttttgagaacgctagcagatttcaagataccgttagagttattgaccgcgtcgcccagcacccgcttctggggagggatgatagcttcaggcatgacggcaactcctagactgaggttcacggagtcacagtcaactttgtggtttgaaaacgatatgatatgagagtgggctcgtaaacttgagaatgtgttggggtaactccttgtgaaagtcgcgctgtcgcgccttcgacgtgacgtttacgcgtgggagtcacgtgtgataagataagctaaattgaaacaaagattcggggcgatttgattggtcaaaaggtccagggcatacccatttagctctagatatctttttttggcttcttataatagaagaggtaccttttaccttttattcaaattagaggtatacatatgaagagctacattgagtagataagtatggcatgccatcatataccccctcttgaggcccaccaagtccacgagtgcggaaacggatgactcgcctccctgtgcttggcatcgtatgaagtctttgcctacttctccattacgtctatttacgcattctcctgaacgtacagtttcagactctactcaaaagacctgagtctattttgccaagattcgcatgccccacgtccagagacattctagtagaacccgatggaagcagcttgagacaatcatagccccgctaggcttctgtgacatgtttacatctttttgatctcaatcccaacgtggcatctccgcccaagggatatttgatacctgtttatttctgtcttctttcacttttgcggcgtcgttcttgatcaaggagctcccatcttttcactgcggggcaacgatcagagcctccggagggcattacgatctatatcgacttgtgcgccggtctttcttctagttcatcttcttctgttcttgaaattatctgtgtaactcgcctctcattgccaatgacgccagcacagcactgattcaagtcttcattgcggtgctaattgaatgaacagtgtatcaatatgtcgatgtttcgatcagcagcagaaatatcatcagactcagattccaactcgggttcaaaagaaagtcaagttgaggaatctggaccatcaactcctcgacatgccacagagaatcaatctcgcgacctaaaaaaggacaagaccaagcaagtcccgaaagactctggttctacagatgcagactcttcgatctctttcagcgatagatcaacattaccacaagatctggctgtgaatgttgatcaacatgcaaatgttatgacagccgccctcttggaattttactgtcagagtcgggcagcagacatcctcaatgctcaacaaggctcaaataaactgttcagccgacacagtcccgaggctcagtatctcggcaagaaactctacaaattcaaatcacagttcttgtcggctcacggtatcttggccgacggcatcgacagagaggaaatggggccaagtaggcaaagttatcgggataacctcgacttgcttagtatatctgccctcgaggagatgaatttccatgaacccgatgcgcggccttccacaattggttccggcgagaacctcgccttaatcacaaagtcttcaacaaggagacccagcgttgaagacgtggagaatcctactctattccgacggaacactgaaccaaatttatcgtttaggaaacagcttcctcctcctaataaggtggattttccaaccgttcccttgaatctccccaacccttcgatttccctatttggcagttcgcccgtaggggttcctcttttccattctccaacatccccaccgtacaatcagctatcaagatattctgtcgaattccaggaactcaagatcttgggtcgcgggtccttcggcgaagtttaccacgtcacaaaccatatcgacgggcaagactacgccgtcaagaaaatcccactcagccaaaagcgacttgagcagctgcaatctgggggtcaaaatcacctcgaggttatcatgaaggaaatccgaacgcttgcccgccttgagcatacaaatattgttcgatactatggggcatgggttgagcaggcccatcactcacacctgccttcagccgaataccaccattctcacccagcatatgacaagtcgcagaatgactcgccttctccagattccccaaatgagtcaagcatggggattgtcttcggacattctgaaaattcaaatcgcgagtctcagtcaagctctctgtctgaagatcatagtttcaccgagagtatccatggctgggacagccacgcgactacctcgtcccatcagtggaagaaaggttcacgaaggggattgtatgaggaagatgatgacattgaatccatcccccgcgatgggaacacttctgttggccaaacatccactttcggggatactgacgacatctttactgatggtctgagccaagatcagtctaaacttcaagttcaaccccgctaccggcctggtcagcaaccccccgcagtcattcttcacatccaaatgtcactccaccctatttcgctcggcgcgtacctgaaccctcaagccagtccgaagtatgatgaatgttcactcgccaggcgccattgcttccacctcctgccctccctaaagctcataatggacgttgtttcgggcgttgagtacctccactcaaagggaattgtgcatcgcgacttgaagcctgcaaatatcttcctttgtgcaccagagactagcacagcagagatatgccttgcgtgcagctccaccgaaacttctcctaccaagttctgtcgtcctcgcatcggggactttggtctcgtggcagatatctcccacatcaatgaggcctcacagggcacaatgacaccataccgagaaggaccaaatatacagcgggtagtcgggaccgagttctatcgtcctccagccaatctatctgcgtcccaaaatgaccagagctcgccagtggattactttgacgaatacaaggtcgacgaaaagctcgatgtttactcgctcggcgtcattcttttcgaaactgtttatcgttttaacacaaagatggagagacaattcgtcttgagtgacttgactcgtgggtcaggccgtgatccatccgagcgcaccattttccctgcagacttcgctgccaagatcgattttggctcgatcgtgctggacgatggaatttcggtcgcggattctctcatgacatgtatcaaaagaatgttggaacccaaatcgcagcaccgatggaactgccaggatgtcaaggaacatttgcgggcgctgaagaaagccgttcgccgattcgaggaaacgcaggaataaatgcctgaaacaaagtcaaggaccaatgagcctgaattttaatatcatatacccaaacaacaatacaaatgcacaactctcctctatcaaacacacattgaagatcagcattcgggcctcggtcaagtagctctccccgcatttctcacaggccttggtcttccccgcttaaagccaccgtgtacttctagtaatcaaataatcaaaacatccacactactatctagcaatctattactaaataccatttcataatggccaaaatcctccgccccgcaacagctccgtacagcgagccccttctcccgcaactagacatccgcaacccctactatacaaacctgaaccacaacctgcgcgccaccgtgcgcgaatatatcgatatatacatcaccccctacgccgcagagtgggaagaagcaggccaagtccccgaagccgtacgccggcactattgcaagctgggctatagcatcgtgcaccccctcacgagcgaggaggactcagccggcctctctctgcctgggaatgtgccgcgcgagaagtgggatacgtggtgctcacttattgtaacggacgagctcacgcgcgttggatatgtcggtgtgatttgggggcttggtggtggtaatgggattggatgtccgcctgttgcgcgttttgggaatgatgagcagaggaagaggtggcttcctggtgttgcgaggggggatattcgattttgtttggggattaccgagccggatggtatgtggatgtttacttcagaggtataactatcttcaggatatgggttgctgactttgtttactttttgcagcgggctctgatgttgccaatatccagactacagcccagcgggatggcaatcactatattgtgaatggggcgaagaaatggattaccaatggtatctgggctgactattgcactgctgctgttaggaccggtggtcctggaaggtctggtatcagcttgcttgttattcccttggctactgccggagtgactcgcaggcgtatgcataactcgggtgtgaatgccagtggtgggtgcttctttctcaatatgacctgtgaagaaagacatcgccaatcaacacaactataggctcaacctttatcgagtttgaagatgtgcgtgttcctgtcgaaaacctcatcggccaagagaacaaaggatttccccttatcatgtcgagtgagttgccttaccaagggtctgaattggctgctaatattttcttcagacttcaacccagagcgccttactctggcgtgtgcgtcattgcgactctcccgagtttgtgccgaagatgcctacaactacgccatccaacgcgagacctttggatccccactgattgaaaagcaagcaattcaatccaagatcttcaaattcggcctcatgattgagccagcctatgccttcatggaacagctcgtgaacatccttgaacttaccaaagaccgtccttccgacgacgtcaacattggtggtatgactgccttgcttaaagtcatgtcgaccagggctctggagaagagtgttcgagaagcacagcagattatgggaggtgcgggctataacaaggctggcaaaggtgctagaatcgagcagattagtcgtgatgctcgggttcatgtagtcggcggcggaagtgaggagattatggcgggactggcgctgagggaggagacaaaggctattcgcactcggagaaaggcacttgagaagagacagtctaaagtatgaaagaaaatacgaagtcactcatgggtgaatgggcttgcacgagtttgtagtttatacctaacctagaattcatgcagtgaatagggataatgataatgatgactatataaggatagaacacaagcaggcattctatcaaccttattagacagtataaggctttgcattgataccgaagatcagatgaggcctctcagcagcaatcttcagaacagtctgcgcgaagaccgagttcgcccatgcgaaccaaggacgggtatagtcctttatgttggcaacattgatagattcgtgaacaagcccaagcaagctagaattacgaacgagattgaggtttccaatgatctcagcgtcgtcgtcagaggtcatagcttgaacaagtagagacatgggccaggcgtgctctagaccgatatgtggaccagcaatgccgtggaactgtgtacccaccagataatatggattggaagccttgtcggtgatcattttgcgtgtattcttgtagacggggtctgatttgtccacaaagccgaggtagggcaacgagagcagtgaggggatgttggcatcgtccatcagaatacgcgacccatacccgtcaacttcgaatgcgtagacatctccatatttggggtgtttaacaatgccgtgatcgcgaactgccttggctagcttgataccgcgttcctgcaggtccgcaacgagacttggggacccaccggctgccttgatgactttcgctgtcttttggagctgtacggacatcatagcgttgggcggaatgaagaatcccaggatcgtagcgtcatcactggggcggaatgcgctgcgaattaggccagtctcgctatttagcgggttgccaacaccagctaggttgagggtctcagtgccaatggtagtctctcgttgaaacgtgtactgattttggacgaactggccctgagtattgaatgtgggctgagactccgcgtcgatggtctctagcacagtttgcaccgctttataccagcggtcggtcaagaacgcaattgaaccagtattttcgtggaactcagtgcctagctgtaggaaatgggccagagagtcaagttcatacttgcactcaaatacaaaagaactgtcatatgcaggatgcacagtgtctttttggctactggcttctggcttgatgccgctgagagccggtggctggaaagcattgcaatagggcgactggatgacaaactcggactgagtgttgattgcacctagtatcagcgagtaaagactctcgtccttagcagctagtttctggtaatttgtgagctggttggttgagtcacgcagccactcggcgttgatatcgcccgtcacgacgaaggtctgcactccggtccattgcgcgccggatcgcttggcattggtgccggatgatgtcgatccgtttgtatgccaacgaattgtagtgtctaaggtatttggaaatgcatttcggaatagctgggcaagatctttatcgactaggcgcgaggtgatatcgtcaatgaccttctccaccgcgggcgatgaaaatgtccgacatggttccgcaggtcgctgaaagggaagattcaagggaccaccactatagggagcgctgtaatattgaagttttgtttagcgaatacttgacatatctcaatgggggtattgacactcactgcggtgttgatgcataggaggtgtagtctgggcaggcacgtcgcaagatggctgggtcgtctctgtctgggagagcgctggcctgaaggcccagcagagcgattgcgagtgccgtaggaatattcatggcgcaaatgtcaaataggaggaaaattatggacagacttgcactgctataaggaagaaggccggggttaataagaggggatgtgtgtcgatctcaaccggacagggatacattccactacacacatacaacttctccgtggctgtttaggagtacattttgacatataatatagaaaccttgaggtgattcgctcggagaactactaagtaccgtgcgaaattgaggtgacatcgctctacgcacgatgacacccttccccgcataaagtgcggagaagatcgacgtcgcggcatttccttgttgggtttatatacttgacatgagctggacgtatgctttagtattagatatctatgctctcagaaatgattgggcacctcaataatactacagaaatcacttcttcccaaagaacgacatgatattaccctgccccgcagctttgccagccttccctttgggaacattgaccgcaggcttcttcttaggcaccggctcatcctcggagaaagactcccacgtcgcctcttcccgggtaactgcaacaaattagtatacgacaaacgaaggggcctcagcgggttgcacggacctaagtatccttcttcatccttgaccgtcttcttcttcattacttgccgcttgcctcgccgccgcccgccctgtatagtcacttcttctttaagttcagctggcttggatggtggcggttgctcaacaggcgtgggctcccgtggctcctcatcggcatcaggcatttcctcatctggatccatgtcagttcaatatttcctcaaggtgcaatttgagatgaggacataccggcagcctcgtcatcatcatcgtccatcatcttcttgagcttttcctcgcgctctttcctgttttcgcgggttcctgctgctactttatcggtggaatcagggaacaattcttctgcttcttcttcagaggctacaaaatgttagctaatgcatcaatctaagtggggcgaactaaccatcttctgcaagaggtgtggcctgtagtcaaagttaatagaacaagatcagtaagagaaaaaaagataatattaatagaatgcagcacgggtgagggcacgaaccggttctgcgggggctggcgtctttgtctttggctttgccttggcgaaagaactgaaaatattgcctttctgcttggccggcgcagctttacccgaaggcttcgaggatgactgggagttggtagcagagggtggctcagacatcggtttgtccaacttagtagcttccgctttcgctggagatgcttcttgctgcagtggccgtttagagggtaccattgactcagtcgaaggcttcaatgccttgccagccggcgccttcgcagatggggctgcaggtggtggtggtgggtgcgcgccagtcctccgctggaagatagataaacattagatcatgatagacccgtcgaagtaatgaacgacctaccctgacatctcgattttgaatcataccccattgcttgccacactccaatggatcctcctgctcgtgtgtcctcgcaatctcccgactggcatcaaccaacacattcaaatccgggagagttgtagcctcaagactgtagacatgaattgtagatatcgactggaatgttgctttcgcatctggtcgattccttcagtaatcagttcatcaccgagacgaatctgcgtaccttcaaggtcttcctcgcgtgctaatataatagaggtagtgcgaattgagtctgaggcatcctcgtccggcaacgagccggtcgagtagggactactctgcatcatttcatcttcatcgtccgcatggccgttcgtaggggtcggttcgggcgctttctggataccggagatgacgtaggttgcgtggacggtttttggcttcttcgcgttctcattgcgatggaattcaaacaggatactatgcaacagagtatcaatatcagctccaaatccaatacccattgttgcgaacgtagaacatactgtttggcccgatcggcgtgtactttcaacgcgcggctcaataagcgatacgtgacctaattctagtaagctcctgcttgtctgaagagtgtgagaaaatcttacaagacgccgctcattgagcacattttcagccagatacaacttcgaatccatagttgctttgctgttgaagtgcaagttgctccgacgcgtgctcaaccacttaacgcgtatcagtcagcgggtcttggcatttgcggtctcctcaggcgacttactacccacttacaattctcctttttcggttgccttcaccgggtgagtccggttagaatttctacagaaaagagctccggagctcagggcttgggcctcaattcaatggatcagtcgttcgagctacccgactccaccgattggttggaaacgccactttcactacttgcgccgttcgaatcctcattacgatgtcaagtctgcaaagacttcttcgataaccctgttattacttcctgcagtcatacattctgctcgttatgtattcgccgttgcctcagcaccgaaggcaagtgtccggcgtgtcggagctccgaccaagagctcaaactgcgtcgcaattgggcaatgcaggaactcgtcgacgcgttcaaattggcacggcctagtgttctcgatcttgcgaggagggaaaatgtgcgcctggctagagaaaaggaagatatagaggagccaacccaaaagaagcggaaggtcaatcgggtggaagaggaggaggtacaggtcccagaaataaattcgcaaggccgacggactcgctcccaagtgtccataaatagctccgcacaagagcgaacggttccccgggtcgtgcctgagatcatcgaggacagtcaggacgatgaagaatatttgcctggtatgacacttttatcatataaaagcctgacccgtctaatcccctcgcagaaaatgggttggttgcttgcccaatatgctttcgcaaaatgaaggaagaggcagtgtttccacatctgaacatacaccaacaggaagaagaagcgcctaaggaaacccctacaaaggcaggatctttcgggtatgttaattctattgcatgtctagaacatggcgctaattggagaaaaattgcattacaggtcatcaaaaggcatatcccaaagaggccttaccctccccagcaagcagcccgaacggcttccggctataaactactccatattaaaggataactcattgcggaaaaagctccgggatctcgggatcccagactgggggcaaaaacagctgttgcagagacgtcataccgagtggatgaacttgtggaatgcaaactgcgactccaaacaccccaaatctaagcggatattgctccaggaactggacatttgggaacgcacacagggtgggcatgcgacggcgccgtcacgattcacaacctccaataatgtgatgcgcaaggacttcgataccaatgagtggtcaagcaaccacgacgatgactttaagcgtttgatagcaaatgcgcgtaaaaagagtgaggcccaagtacgatcgactatccctggcgcatctccgtcttcatctagacagaaggaatcacaaccccagcaggatactggattaccggtgaatggtgcacacgttgagttcagcgcagacaccgatcctaattttgtcattaacctatctgggtgatctcaaaagaagccacattgaactcgaattgagaagcacccagaagagtaaactattcattcacgtaaggcagatatctctccaacaatttggagaatctcagtttgcttgcatcgggcgatcctcgacggacatgttagagagcctgtcaataatgttatctgccagtgccgagtccgcatcttcggccgcacgtgctcggcgggaagcctcatcggaggcctgcttgacactgtccagttcggcaagtctgctctcgacgagtgcctctctctcgctcgtctccattgccgcaagctcatcatcaatctctccctcgtcaatgactggcccagcctcgttcatgacgcttccgacctcatccaccttggccatctcttcccgcaattcttcaacaatgtcctcaaccctctcggcaccaccgatctgagtatgtagactgcgaagcacaccagtgcttgacttcatgatccgcaccatctccacctggtctgcagcttgctcgatctttgaataaacctcatcaagctgtatgagagtggtagttctgtcctggaggttcttttcagccattttcctggaacgcacggcggacagcgctgatatgcggttcttgttcgccaaggccgtcttcgcagacgcggtcagctcagcgatctttgctttcaggcttgtgacctgtttcaacatagtcaactgcaaggtcttgatggatgcaatagttgtgtcctgttgggtgatttccgccgattcatctgccgatttgaacttaattgtctagccatcaatcagtcaatatctgggtatcctggccatattatatagtccaacttaccttaccatcataggcaatagcactgctatcgcgggacaaataaagcaacaggacatcaaaatctgcgtctgataattccgtagcttcgttcagtatggccgcaaactcttcaacaaacatttccctagagtaaataaggtcaagcttggatgatttgccgcctgtggctttcttaaccgctaggtctgccgcttcctgtaggttctctatcaagaccaactcctgcacctgcagcttcggtgctgaatcgctatcggaacccacaacgaagcctttgagctgtcgagctccccagctcataacattccaaggactcagaaccccgggatcaattagcttccactgacttttcttttgcagaagcccagcagttgtcttgtaaattggtaatggaatcattgaattcttgcgcactgcctcatcctgtaaacctcattagttagcttaacagctctgtcatccaaggggaagataatagacctacaaatacagtacccagagctgcgggtctcccccactccggactctctaaatctcggagcagcgattcatccgttcgcagaattagatggtctgtcttctttcgtttcaagggtgctccgctctcagctgatatggtcgagccggaacgtacccgcacaccgcgtgacgaggtataaccgcgctttgcggctcggttgagtgcatgttcccatgcggcgacgttaacagcgtagccgtcggggtttgttttcttctgaggtgtgaaatcagagtatagggagggtaaacggttcctaaggacataacatcgaggtaagcatggtatcctctcttctgtttaggactcggtttttaccttcggaatgcttcctcatgagtgaggatatatttcagtagttcgctcatcatgcaagggtatgttgaggaggaatgatatgacccgctgtaagcagataataataggccaagttgtctcggagacaaagcagatagcgcaacagctttatcgataagccccacgtgacgcgtccgaatgtgatgcttagcagttctacgacaatcaaaggatgcctaaatttatgtttggacaagcttgtattctatggctatatgctatggtgaggtattaaggctgtaatgagtctaagctcgttcaaagtcatcattgggtgttccctcagagtccagaggcccctgcgtcgtgttaaaggctccggtatctagctgcacaggatgcccgactagagaccggcgatgatggcgcatgtcgagcttctcgctggtctcttcggtgtccaatggatcctcactagccggtgcatctcgggcatcgaatcccctcgattcaagatattcaaccttgacagcatggcgcagattgtcaacgaagctctgcatctcaggcatatggaacaccccgtcagcctgcaagacgtcagcatagagaagctcagcttcttccagacaggccgaggctagggttggatgtccagatttgagccattgatcagcagcaaggatgctccacatgccggctttccggcgacgtccaccccatttcgctgcaccaactggtgtcttggaagcatagcaagctgctaccctttcagtgtatagaatatgacccactgagcccacaagaccaaaatccatgacccgcatggcccatttggctgcgctctcggtagctgacccgccacgagacttgaggagttcaaccgctagggataaacaacgcagtgcgtgtggcgcatctgaacaacgtgtgagataggagtaacaagcagtctcgaacatttggtcgacgctctcaagcttgattttggctgatgtggccaatggatttaaaagcatgctaacagcgcacatttcgtgcgcaccagcgtgatacttccaggctttgtcgttaccataatccgatcgaatcatatcgtatgtagacgcagctaacttccaatcgcggagcatgaacgcgaagtccgccatctttcgcaagagagcctccggggagtctggactataagaatgttgtgctggatcgtagttcccgccgttgcccccagacgagcctccgatacttgaacgtgagcttgaaccgaagccagcccaccgccgagacatcgacataaatctgccacttataccacgcctccgagatgcaacctggtcgttccagacagctactttattttccatgaagggaatgacggactgcaccacgagttctcggatgaatgccctaatcgcagtagcatcggagccaaaaagatatggcgtgccatcagtgccgagatcaaccaaggcttctagcaggaagttagtttacgtctgtttgtgtagtagcgaacacttgcctgcttcacctgcccccgacagatactccgacggcgagagccattcgcaccggggaacttgcatgctatcatcgtctgtcaccacacactggctgctccgaagtcttaaaagatggcaatgtagcccaaagtgccgcttcatctgatcataaagcttgatagattctgtgatatcgtctcgttcttcgtcatgaactaaaacgtaataacgaagatactcctggttgatccagtcgggtagctgtttgtctccagtggtaccatcagcatagagctgcctgagtgactccaaaggagctgggttgcgcgagctgatggctattacattggctactgggtggccaaatgtctcgtggggagctgtaggtgccgaacacagcagttgctgcaaaaacgacttgcataatggggttgttgcagggaatcccagaacatcctttgtccgtaccgacgcaccaagcatgtcatctgaagagtctaactgcttggtcaacaactcttcaatctgcgccaggggcccagagtctcgactagccgcggccctaccgatcgctctgaaatcaacaaaggacactccaaaatcctcccatgcacgactcgagcctatactatcccggatcaccacctttccggaaactgtttctccaaagggccgcaccaactcccaaaatccccctttgaatcccttgctcctcaccaaattatcggtatcctccgaagcatggactgcgatcgtcggtgagaatgaccggataattaatgatcttatatcttctgaaccatcggactttccatcgaaagcagaaccgattgatgaccttgctaactgtggggtggaagatcttcgagagcgcgagtgcgacgagccagatcgtattggtaagtcggcgatcgtgtttgaaagagctgtcggcgaggagacggtttgggattctgatagttccgcatctaaagattgatttgtttcatgttccccatggtatcgtgatggtgatgtggatgcgactcgcgcaacgccaggggagaaggacggcggaggtttaaccggagcagcatctccgggcgatgtcatgggcggacacctgctgctttttgcagatttaaagcgagtgcagttgatcgacaggccccatcgactggtagatgagattggaggagttgtaatagagcgagtaggtgactgcctctatgtatgtatcacatgatctgtaactagagataggcagagtcagcgctccggtcaccactgagggaaggggattttcaccgctctgccggttgaccgccctcaaaggcaggagattaatttatcattggggagtttatcttttagaaatacaagcacaaccacgctctcgtggattttcttgtcagaaagaagtaattcttcataatcaatttcttttctgggagagaattaggattttctagcaagacggtggatacctacaatttgttaacaattaagtcacttttatcacatcaactactttatcgtcaagaactgctcccaaaactgctctatataagtaagcggacggattttcgtcaccgcctcgtcggttgaccggttttgtcattccttccatcagtcaacatcatcagtctttctctgtaggaaaagggatactcatacagctgcattattccatcacgttcatcaaaaatctacaggaggagtcttccccacgagtggcgtgaggcagattgcggtctgacaacaaccacctctagttgactgacaaaatccactggcaacatggagaaggtagataactaccagccaatcagtcggaacgataacactgtccgtattctacgagccttcgacaatcaccttccggcagatggcagagccaatttcatccgccatctccagtccctacaaacaaaccaagacatccatgatcatgccgagtccttggtaaacggcctgcttgcgccaatgaagacgcttcgctcgacacccacaatttccccacgtgctggaatggaagactcgatcgagaatattgcttcgcagtcgagtggaccgttagtaagagaaactcgacttaaggcagagtgcctgaagcgtgacggcaacagatgtgttgtcactaagcgtgtcgatttccattttctctcaaaaagtgacaccactactccgggagccatcacagaatgcgcccatattattcctttctcattggcaacatggcgagatgagcgcgaatcacacgctaaaaacatcatatggacaaaccttatccgacatttcccagcactcgaaacgagaatcagcttttcccgggataatatcaatgataccatgaatgctatgacaatgacccgtgatcttcatttctactttggccatttttattttgcgtttgaggagactcaagtgcccaacaaatacagactacaagtataccggccaaatgcattttctccccctctccctcggacagtcaaatttgtgtctcgtgacccacggtatgctcttccaagtcccgaactcctcaaggttcatgcagctgtcgcccgtattttccatgcatctggagcagcggaccatatcgacaaaggattccgagatctaggagagactagtgttttagcaaaagacggcagtaccgatgtttcagctatgttggctgttacctcacttggtgttctcggctcacgcactgggaatatccagcagactccagcgaccttctcgggtcccaaagctcaaagtgtttcaaaggttcacagtgggttgattgaagaagagggtactgatgaggaatacaccgtgtggtactgaatgtttcttgaggtcactttgaaggcaagaattgtcggccgcttatgcggccttnnnnnnnnnnnnnnnnnnnnnnnnnnnnnnnnnnnnnnnnnnnnnnnnnnnnnnnnnnnnnnnnnnnnnnnnnnnnnnnnnnnnnnnnnnnnnnnnnnnnnnnnnnnnnnnnnnnnnnnnnntatgcggccttgccaggtattttcttgatagtatttcttagcgtctaggcatacatatctatatcctacaacaacaaaattcgatatggtgtactagcggttcaagactgcgttggaagtccgcttcaaggtgttgttggggagaaagccaagtcgacggattcgggccgacaagcaccaagcaatggaatagagcgacagcagccgtgaacaagctaagcactaaatcattctaaaaaggctaaggatcgtcttgtcgattgtaaatgtaatacagagtactctcggtagaagctgatagtcgatctccaagtggtgatgcaaaccacgtgagggccatgcttatcgacaatcaaaccgagttagtttctcggagcatcaacctggctctgtccaatgcagttgcactcttttgtgtgtgtgtttaaagcttctggtatttcttcagttaaagctccatttgcccgcactctagcgagaagagctggtcaaatacgcccgtttcaacaacatctacccctccgaacctactctgcatctgtaccccgtcgcatttccatgcgcaaccccgaatcggacccggacttctcagaacgagtcagcaagagacgacgcatttcttccccgacgcgggaaggctcatacgcaaccatgagctccgccatgcctaccatcgagctcactccacttgaaagcaccttacgaaccctactcctcgatgtcgcacaatacatcaccgagcagaaaattgccaatggaggcagcactgcgaaagatcactccgagactgtcttgcgcttcacgggcgggtgggtcagggacaagctgcttggagtcgagagccatgatatcgacgtgggtattagcaacatgacaggataccagtttggtatggccctgaaagactacctggatgttccggagaatcttgaaatatacaagaaaggcctaccgaatggggaaatgcacgacgccattgtgagccttcacaaaatcgaggccaacccagagaagtcgaagcacctcgaaaccgtcacaaccaagatcttcggcctggatattgatttggtcaatctacggaaggaaacatacacagatgacagtcgaaatcctcagatggagtttggcaccgctgtcgaagacgctttgagacgcgatgcaactatcaatgcgcttttctacaatctaaatgagtcacggctagaggatctcaccgagagaggactgaacgacatgaagaaaaagattatccgatgcccaatggaaccatatcaaaccttcaaagatgacccactgcgtgtgcttcggttgatccgctttgcgagcagactgggataccaaatcgagcccgaaaccgaagccgctatgcagattgaagacatccgcgaggcattgaaactcaaaatcagtaaagagcgagtgggaaccgagctagaaaagatgttgcgtggtgagtcattgcacgtgtccggtattctatatctctaacaagtcgtatctcatatcttaggtcccgaccctcgcggtgcattgcagttcatcgatcgactccatctattcaccactatcttcgctaatcatcaggacgaagttaaggctgatacatcgacatggccttttgcctacaatactttggcgcgattgctgcatccagaggttggtgacagcgatgaacttcaggcagttaccaagcgcattcgtgagatcttattccgcgataaaactaccatatactacgcctggatgattgccacctttgctccctggacttcaattcctggccggaccgggaaaggatccaagcccttgcccccgcgagcggttgaggttggaagagatggccttcgcagtgacaacaagacgctcaatgcgctccgtgctgctgctctgcattacaaggaaacaattgcgacaaaaaccgcacttctcacggacaagatgagtggaacaccggcagaaatccgacagtgcattggattgcaaatacggtcgtggaataaggactggaagctttgcattctcctggctattctgcaagaaaacatggcgctccgtgactttgcagaaggtaagatccgttcccttgatgataacattccaattcttacaatgtgcagtggcccgtgaatacgaccagttccttgcgtacattgtagaaaacgatctggagggtgtttgtgacctcaagcccattgtaaatggtgacgaaattatgaaaagtctagggtctaaaaagggaccttggatgtccaaggcagtcagcatggcccttgaatggcaacttcttcatcctgatattatcgacaaggaaacggtgctggaagagatcgcgggtcgacgagcagaattcgaatgacgtccgtagatcccgatgacaaataaaatcccattccacggcggggacaactcaaactacttgaacttcaattgtttacaactcttctctttcattgtaaatatcccagaaatggataaactgcgcaaagaagcccgtgaggctctcgtgctgaaccctggcaaaatgccagtcggtttcttccccgccgttgcggctgcgtccaaaagtgatttgggtcaattatggcaagacatcgctgcttacgatcactcgacgcatttaaatgtacgtttttgtggatttgatgaagaaaaatgaactgattctccagatctgcgagagccttgttacggcgaccagctatatcgactactgggatgggatgctgccaaatgaccaaggcccgcgacccttgaaaccagctgaagccaaagccgtgaacaacctattcgactgggccagtgctgctgctctgccttcgtcaaattttgctgtcgattttgacgagactgccgagatctcggacggtaagttcccttataaacataaacatgtggaacttttactaattgtgccacacagatattatcaaggctcagaatgagagtcgttttagatctgagctcgctctggagctgattttggttttaaacaagcccatggcaggattgccaaatggcaggccagacaatgtggcggacattctcctcgcgggggcatgttttgtcaaccagcaaaacccatgggtcacatcagagagctacaatgcgacgtcgatgctcatgaacgtgtgggtccaagacactcatcttgccaatacattctggcccgctatagacttcatcctcaaggagaggattaggcctctttttgcgaagacaaaaaactccgccatcaccagtgccggccgcaagaacttccatcctcaaactctacctcgcttcggttcaagcgatctggacgcatcggcaaagccatggaagaccactgatgtctacgtcgaatctgtactgtcgtggatcctctcacagtaccgacccgaggacaagacacagttcgaaacgcacttccagcttttcgtacccactatcctagcaatgattgacgacaacaatatcccattcaaaacaaaaggctgtgccctactcattcagctgctgctgccaatccaagaaagcggctcggacattctccgacggacaaacctcacctccgtcttcgaagacgccgtcacgccgtgccttctatctttaccatccatcacacccgaagatagatccttagagctactaggagaagcatacccagccctcctctccaccctcaaaaccgcctgtaaaggccccagccaatccgaacaggataaagaagcctacactaccagcctcgccaaaatcctccgatcaaacctcatctcctccttccatcatgtcagctccggaactccagcctccttcccgcatccccgtctctcaaccttcctcctacaaaagataacgatcatcgtcaacgagctgggaatccacactacaaagtacctccaagaaatcatcccagtcctccacacaacactttcaaacccattcggaacagcacaccctccgttgctgttagctgctgtaacagctacacaggcggtgatcaagaacgcacacccacgtatttggcgctggcgcggtgagatcttgagcgggctaacttcgtgctggctccatattgctgaggatagcagggattccgtggctgagctggctaagctgaagcgggagttgcggcagacgcttcaagttttgaaggttgttttgctgaatcctgttaccattgcaggtgatgccccagagccggaacagctgcaggtgaagcaaagtgtggagaaggagttccaggaacttgttgatgcagatgcagagcttaagggtctatttgcttgagatttactagcaaattctgtctgaagggttatttttaaacaacaattatgacaatctcaattgaagatatctgttaggttgaagtccggacttgctcttgagatatgggtagtagtcaataaccacgatccatagaagcttcaataaagtaaaataatatgtaacgagggtatcaatttgcaggatactgtacgccaaaacaaaaagaaaaacagatactcaacttcgcatcatgggtcaacccgctgcttgaaaagactcttcccgcgcaaccactggcggtatcgtttatatctcttcttttcgtagtcctcacccacgacagtaataccgtcctcggagacatccaagaactcagcataagccagcatgtttaccccagccctcgcctccagcgcagattcctcgacattgcacttgttcgcgtactctaggagatcgaggttgtagccgtggtcttgcagcgatgaggctgtcatttcatctgcggatgtgacgacaagtgggaccttgagtgggtgattgatgtaccgctcgtattcttctgcctcggcactggtaacagagggactgagcgagtcgctgactagctggccgagggtccactgagcgatctccgctttgctgggggtggcgtgggcgtttggtgggtcaatgggtggaatgcgggatacatgagggattttgaaagcgggctctttgatgatgcccgtgagagggggctgtttctcggatgagggtaattgttgagcccacgtatgtgtggaatcaggtattggcaccgtgcttgatgaagcgctactgcggggggtggatggctcttgaatcttgacgctacgctgtggtaggcgctcgcgttggatttgctctggggggatgcggggcacgaagggactgagatcgggaactgggtgccctgggcggactgggggtaggtagcgggacgtggagttcattttgcaggagaagactttggagagggaagacatagcgagtggtcggtagtattccatccagaagtcatcgaaatgtgagagtggcgctttaggatggaatgggaggggtggaaatttcctggcctctaaattttctggtgtgtaccaggagatatagtttggtttctttctgtcaaagtaggctttgggatcggtatggtggagataatagtccgtaggaagatcccaaagcatcggaataccctgcgcgaatgtgtaatttccaagaaagaggttatatgcctcttggcgctgagcatcaaggaaagagttgttgtaataccgcttgaagctttctaccatatctcgagaatggctgctccattgattaatcttgcggtaggtagccatggtgttcaccaaatgcgatccgccgtactggatagcgatagtgtctccatggtcatgccacatgttcgtgaagagattgacagcatcagtatcatattctacagtggtgtcatctatgacaccaagcgcatggagctgatagccaagtgccctcttgccaatgacaaactgcgcagcatttgttcggtcgaggcaatcaatgcagttggtccttgcgacaccattctgaagctgcaagccggattctgcatcatccccattcttgaaaaagccaattttgggaaggatgtcgcccgcaatagcttctaacgtcttaataacatcctgatcccggctttttgcagcacggctcatatcccacgcctcgtaaatgagcttcttgtcctcaggaagaaactggttcaagtaagtcaccgcgttagtgaactctttgaggagtattgactctcttggagttcgttcgcgggacttaaccaggttcagaacatagattggagcaccatatcttcgaaatagatcgtcgaaatgcaatgccgcagccgagtagaatggatccacgagattaagctcaatatccggtttcggtgatacgcccgtgttttcttgagtccagtgaagaggaatgctcccacgatgttggacatatgaagtatagtgagggtttgcataaagttttgggccagcagaatggaacgacgttgttgtctgttcacatacaatctgctcggtctccacatcgttggccacgtatcccaggtcatttgcgcctcgtttgagaaagcgcgctccagcaaagaatcgggatcgacgtgcgataattgtaatgtagaccactcgtccatagacactcatctttgactgatccacatatccatgaatgataggtagacaccactcatagggattcttgaggacctcagtagccggggaaagaagatgatggttccaaataaacatggaatggtaatcatgcgaagatggttgtggatgaccatcctggtgggcttcgcgatcccggcagatattatgctggagtgtgcgagtgatgtcgtaggaatagctgaaatagaaagaccgcgacaagtctaaattattcaaaatcgcaatatatcgtgcctcctccgaatgtttctcggccttaaggtgtgaaggttccgaggtggtcaatgggatcagttcggtttcgtcgatctgatagacattgtggccacccagcatggcaacctgggtcctcttggtaacgagtagcatatagtatgcacctgtgaatcggatgaatccaagcaatgcccatgcactgcacttctggttaaatccgccagagctcctgttgccgtcgtcgatcgcatccagcaactgaaccatctcccttttgttgtacaccatgtcatcttcggtaatacttaactcgccggaatccgaggtccgatcgatcttcagaatccgaaaacgagtttccgcaagattgaacccgaccatatagaatcgagtcgcggtttcatatagcgtaaatttgtgcaagcggttgatcccttcatcctctaagttgtccgaagccgtccggtgtttctgcgcaaaagtcgttgaagcctgtcgctcaaaggaagttgctacctgtggctcctcgtcttccacatccccttcctcttcctcctcaatccgagctccgggcggtggattgtacggtaatgggaattctgacccgactgaggcgtcatcaattattccagtatcatcggtgcgctctatttgcgacgagggtttgatgctcgtcgtttgggtcgaggctggtccccctgtggtatcttgtttcgccaaattcgggtcggatggaatctcatcgtggaaaggtgcttcctgggacactagtccaatgagagaaacatcatcaaagctctccatagctcaagggctcgaatggactcaaaattgtgctggaaaagctgcatacatatctaaatgatttctagtcaaaggcgatgttcggaagttcaaagaggaggtccccacacatgacgtcgtagtaaatagcggccaattggtcacaaaggcattctagggctgtatttctattttggtacttattccagacgtttggtttctttctaggtgtctttactagatatgctcttattagtagacaaatgtgaatgttcgctgggcactgattaggtatgccataccaaagtagcatatgaagagccgttaccgatagtacctgaaaaggagtaggatttcttttgttgcatcatatatacaattcgagcaacgatataccctcttttaaattccaatccaacgcagtctggtgtacaaaatgcgatttacaattaatgtatcgagaactgggactacgcgatccctcaaaccaacactctcctcaatccatcagtacctccaagcactctcctccctgttacaggacacctccccttgccactctcccatttaccagatcgcttttgggggctttcttcagagtcatctccactagggctcttctttgtctcttcatcgtcacctgtgatctcctcttcccacggtgcgccagcaccctcgccggtcatgaaatccagttggcgctggtgctcaccgttcagccagtggaagatgcacacataacagaacacgtaccccgtctggcaagcagtcgggttaacgagcggacccatgcagacaggacaagtatttgcgctggaaggatcagccggaggcaaagacacagtgtagatgggaagataagaggtcgctgaaataggcggttggtggcgacgaggaggcttgagtgctggtttgagatcgccggcagcgctcttcttctcctgctcgacctgctttttcgccttctctttctcgtcttggattgacgatttccgtcgttccgcaggagaagtcaaacctgccacaatgggggcaggcagatccaggacctcagttgccttccgggctagctggcgagagaagtcgcttgcatgccaccattctaggaacttgagggcgaagattgacgcaggaaggaagtagcgcagcgaggtcaagagctgagtatggaggttctggggactaaggagaccaagaagacctccgccgggtcgctgagatcggccggtactggggccaggcttaggatctagcactgcggcgatggcgcggtggtctgcgatgccgaggcggcggatacgcgttccgataagccataggaacggggaggagtattttgtattgtcgaagaggtaggctaggttgaacgccagaacagagaaatagtatgccgcattcacggatgggtagacattgcgcaggaaccacttgtagtagaagaagatgcgttggcgtagcgacgggttgaccggcagatcgtcgctaggattatatcgtggaccgctgctggcaaccagagatgcatgtggtgcggcatgaatgtcgtatccttcgtctaacttgcgctttaggtaaggtattccaaccatgacgatcaggttcctccagatgtccgtcgagtgtagcttcagggcctcgcgcacagggcctgcggcgccaacctgggcgcgcgggatctcgccattcttggtgcggagaacgcgctcacgtttcaaggaatagaagttttctgtgaaggagccgccgaacgttcgcaggtagtaacgttcgactattaatgaaaggagggcatagatttcgtcatatgagttgaggatccggaggagatagcgcgggtggcggtgtgttgcgactgcgagaagataacgcaaagatggaggaagaagatccgagagctgttgctcagcgaggagttctgttgtcgagcacgaacctagcgttagcgcttctaatcaatacgcggggaagcatcaatcgacttaccgaagagcgacggcttgtgctcgtcgaactcctgttgaagactaggaaggtactccatcgtcaagagtgccagtcatccttatcacggtggtatttgagggtgtttgaagagagaaagaggaagagtcgccggaaccaatgatcatatgccgaggctcaacttatccgagctgactacgtcgctccgggcgggctgaagatccatacattcagaggtatttacaacaacttcaatatgtaacatgagatacgcatggaatattgtacactggagaacatatgctagattattttacaaagttgtttcctcgtcgttcaattttcccgagcaagtgcctcctggcactcagtccagagcggcatgtagaagctctgagacgcttcaccatctcgattctggagtgtcgggtctgctaccagaatacaatgcatgatggctgtcacgatcgggccttgtaacacaatagcaggggactcttgattcatcaatgctacccctgtcgacagacactcgcgcgctcgcacttcctcacccaactcagcatgcaacttgaacagctgcacataatcctcttgtgtgcgattagcgcctttcaagggaaactggcgccacagacgccaaaacccgtcgtaatccccgcattgaaataatgtcaccataagctgacgcgcatctactacgtcaaatggaatgttggccgccgcgagtatcttggacagtcgagacaagatctgtttctgagactcggtttgttgaacaacagacgaacttggaaaactctcttctgggcacaattcgttcgggctcgaaggtgctagattgggtgcacagactgcttgatagaggatattgaaaattttcatgttcaaaatcggcacaccacggagggccaagcgatccagaactaacaaagcaagctccatgtcaccctctgaagaatgagtcctagactgttcggtgataacacccgctgttctcggtgttagaagggcagaaacaacatcgaatccaagctcatccggaatttcatacccgtcgcgaagaaaatcagagattgtgctaaaaagtgcatccttggtgtaagctgggtgttgccgagacacagcaatggaaaacagtttcaatcgaaaggtggctttttcctgtgcagaaaaccgcgcggcgtggttggtatagaagagccgtaggaaaagagtggactggcgatcatttgggccgcttccaagctcatttcgtgcactatcggctggaagttcagcgagaatctgaagcaaagatgccggtgtcaattgagatgcaactgctgctgcgccggctggaatagtggaagacgaagttcccatgcccgggaaaccagcttctaaaccaggctcggtggagttcatggcagatagtgcgagtctacgcatggtatgaaagcctctcctttggccaggaatggaaccaaatccatcggacatagacctggggggcgcagcaccagtcttagatgaatcctctgtgctgtctcggatgttcttgcgtccttcacgggctaaagtagtctcccagaggccgtcaaggtcaacctcagcccgcttctcctcggtaaagatctggacaaccacgctagtaccaaggtcaagattaccaaatccctcaattccaacatcactcaactgggttgtagtatcgcctttgtccaccatacccgcatttacacaaatccatcctgtggtgattccatcatccttttcgtcgatcatagtgcctgctgcactggcagcgcgcgctcgcttggctttacggcggagtttaattttcaactcgttgcgtccaagtaagccgtcggcgtagggagacaatttgtattggcttctcagccagcgacagagacgatccgcagacacgttcaaatgcttcacactgcgagcagttccaatgatcatgatgacattggcaccgagagctgcagggatttcgaggccgcgcaggtcaaaaagcttgaggccatccaaacccaagtccttatacgtatattccaatagagtcgagagcatctccggtgaaccttctgggattttagggagatgagcttcggccaacgggcgctctttaatgattggcgccccttcctgcagataccaggggacgtgctgtgatgaagctggcgcatttgcttccgagtgtggtggtggctcatctacttcagatagaagagtatcaagctgattcgaagttggagggcgatcagatcgcagcaaggttacagcggagaaggctctagggttggagatcgaacgggaggaaagaggagaggatcgtggcattgggatgccggagacagaaacaaaggaccgcagcacttcatgccgacaagtctgacatgcagcccctcgtaaaagagctctgctcatagtgatggttatattggaagaaagaaatgcggagcttgagttcttccaacaggtccagttcttgatttgctcccagtgatatcagataacgggagcaaacactgcaaacagctgagtcatcaagaaaaaaaagattcgggtggggggcaattatcacaaatcgacgaggctgtgaatcttcaataccctggtgatttttcattcttgggttctgatttccgactatactcatcaagatgtcgatggatctggatgcccccgtctattttgcgcagcaggagaaagtcgcagcgacgtgagttcttatcgcaactttgtttctacctattactccccaccttctcaaatactgatacttcatttccctcagaattctctgctgcaactgtggtgctgccattgatggaacactctcagctggagccctatgttcggattgcattcgtcttactgtcgatgttgctggaggtgtatgtattaccccgtttgtgggctcaaaatcaaaagaagccttcttacactataatgtattccaactaacatggactttaggtgcaacgcgaagcggtgattcactgttgcagagattgcgaacggtggctgcagccccccaacagctgggtcgtcgcagctctcgagtcgaaggaactactcgccatttgtctacgcaagctccgtggtttgaacaaagtccgaatcatcgatgccagtttcatttggacagagcctcattcgaaaagattgaagctgaagatcaccatacaaagtaggtatccaccaattcagccaactgagcacatctagcccgcgggatcgaagctaacaacctacaagcggaggccttccaaggcactatcatacagcaacaatttgaggttgaatatgttgttgccaatcagcagtgttcagggtatgtccagttataaaccccccataacggttaatatactgacaccacctttttttagctgccagcaaagttacacacacaacacttggggtgcaagtgtgcagatacgacagaaggttcctcacaagcggacctttttgtacctggaacagttgattctcaagcacaatgcccataaggatactatcaacatcaaggaagtgaacgagggtcttgatttttacttctcaaagaggaatgaggccgagcgcatgctttccttcttagagtctgtggtgccttgcaagacaacacgatcgcacgaactcgtctccatggatattcatacgagtaagagtgtctacaagcactcgtggtcgtaagttttcccagatccaactcctcgcgcacacctatctaacaaccgcatttaaaacagcgtaactattgttcctatttgcaaggatgatctggttgctctaccgattaagctggcccgctcattgtctgatataagccctcttgctatctgccaccgagtcggcacttctattaaccttatggacccttgcactctccggacaaccgatcttcctactagcacttactggcgccaacccttcccgaatcttgcagataccaccgagcttaaggaattcatcgttttggacattgaatccaccggtcactctaatggtcgttaccttctgtccgaggccaccgttgctcgtgcttcggatcttggatctaacgatatcacctatttcacacggacccacctcggtggtatcttacacgtgggtgattccgtcctcggctaccacttgacgggaacccagttcaacaacgatcaattcgaagcaattgagaatagccaccagtacagctcaacaatcccagatgtggttcttatcaagaagcactacgtccgcagcaagaaatccaaggctcgcacctggcgcttgaagcgcatggctcgcgagcacgaggaggaggcgactgccgctgtagtcaatgttcctacaaacaagcgccaagagcaggagcaggctaggatggaacaagattatgaaatgttcttgcgtgacgtcgaggaggatcaggagttgcgtcaaactcttgatctgtacaagaaccgccagtaccaggtcagggcagaccaaatggatgaggatggtgatgatgacatggatgaggagggacacgctgtgccgaaaatcaacatggatgagctgcttgatgactttgatgagttgaacatggaggacaattagtagcaatctggattttatcatggatgatcatgggactggttggcgttcgtgttttagggttttttcaatcatcaagaaaagttgttttttttttcgaattgatgcatacaatgtacagcatttacttctggaacagatcaattcagatgaaaatggatcaaggaaagagagacgagagtatgtagattttatattgtaggaggcagtttctaagattgtaaggctacactttacaatagtactacggaatggcaatattcgatcataacatctcagtgaatgatatagaaatccgggctgtagtagatcaaatagacaggccagaggccataaaagccaataaaaacaagacgaaatgttccccgtgaaatcctacttagaagatcttcccaagtacccgcttcgcgtcctcggccatagcaccatccttcgatccctttacaacctcattctgctggaaatggaaccgccttctcgtgggctgcttgtccttcttaggctgcagcagttccttatccccatcgccagccgcctcaccagccgcctccaaccgcctcttcatcttctcctcattctttttcgccatgccatcagcaatgcgaccactctcaacacccgcaatgaacattttagcttccttagattcgcgagcgtcggcaatcttcctcttgctttccctttcagatctctctcgttgtacggattgcataagatcctcccaggagtaccgtgagagatatttgatgttccacacatcatcgtgataccctatagatcgcagcactggtcagtattcatcacttatataagggcgaaaatgccagtaaactcacagctcgacttcaaaccacccacgatagtcgcattcaaggtctccgcgcagatcttggccgtctttttggagtcaaactcgatccacccttcagtgtagagctttctcttattcgagcggttacgatggccggctgcggaggggagaagaggggctaggaagatctttgtgatccctccgaaccctctcttctctagcattgctttcaaggcgaagggtttgaggtacggcgggagagaagagaagtatataacgcctgagcgctttttcttgggttctttgccgttcgcgagtttcgacagcttggcgagcttgccctttgctttgagcgacttggctgatttggtgctgggttgtgctgggtcttttggacttgtgccaccgtcttcattgtggttatcttcgtcttcgttctcggcatctttgtcgttttcctcctcgtcctcgtcttcgtcagactcctgcgagaaatcttgcgtggttgtcgtccgccgccgcttcacggcccgtcctttgctctccaccacattggcttcagagtcgtagccgcggtcgctgccgctggcctcatcatcatcggccgcgatatctagaaaatcattatgtttgcgagtcgtcattttgtggaatccgactagggttgacagacttggttatgggtggcggaagtctgcaactttttttatgcgggtggtctgtgccctcggagtcaagccccggggccgttccaaggctaaatctactaatcagccacacatgagccacatggcaaagtcaaagagtccagcttaagaagggtttaagatgaaagaaattcttgaaattttgtaccggtatctcgaagaagccattcgggctctgtatgctgaaaagaaccctcccaatgtatccacgaaacgccacagagaaccagtataagagcccgcatgatatatgcaaacaaagggcaaaaaattgaatatgtaacaagtctaactaatgcccaacgatcccttggctcgctcataaacgtagaagctcactgcaaccatcggaatgaccttggcgtatccgatagtcagtccaacccagaagcctctgaaccctctctcgagccagattgcgcgggcagtttcagctattccaagtcgtcggccatcaccaactgcaccactgacttgcatccgccgacggaggacctccaatgggtatgatgaagtctgcgaaaccagaccagccacagcaccagacagaagctcaaacgtggtattgagctgcggtcgtttgggtcgatccgcggaatgtgctaactcttctggtcgtctgagggtgtagcgcgccacactggggagacggaacaagtcacccactgtgtcgtgcgtgaggaaagacattccggcgtaggggagcatcccgaggatagtcggggagaagccgcggtagaaattggcaatgccgctgcgcgggaaaactttcgaagcggccgctgaagcgctttcggcagcagcaacggaagaagactcggctgccgcagcagagtgggttggtgagggtctaacacgctcgtggtagatttgccgccataccttgaccaagcctaagtgtttcgactgtctggtttcgtatgccattcgcacgcgcatcaattctaatgggtatgtgaaacatacagaggtgacaccggccaagctgccggagatcaatcgccggaacggggtctcgaattcgctggaaggaataatgaccgcgcgaatctgctcgtatgcaaggaactttatagcggcgtaggggaaaattcgaaggagggtcactgagtggcccttgtacaggccccgggtaccttcattgcgtttgatatctcgaatcgctgaggccaggccagtccagctgcccgtatatttggcgaattgggggttcgacgactggaataggatcttcacgcggtctaggggcgctaccacggtcttagcctgtaatgtccggcgcattaattagtataaagctcgtaatgacctgtcgcccaggaaacttaccgcacaccctgccagccctcccgcaattccactcctcatcacataatcaaagctacgcttttcaatcttgtttttgccgctttctggtatgcccatgtcggcggtactatttgacttaaatgatttcgtagcgccgccgacaggcggcgatgccgaatgtgcgacgctcatcggagcgaactgcggagtagagtctgggattttgggaggatcgtaggcatagtccaaatgaccagtcgacatggaataggaagaggaaaaggaaagatgaagttgtaaaagagcaaccgaggctggtaggagggggaagaatatccggggcgccctcgtgatcagtgtcggcgatagtgagatttctggggtaccggatgatcttctggacactgcaactgtacacgcaggtctaagagttggcggatagcactctaagcttgagcggagtttcgaggaatataatgacagtgtaatggcaaaagatgaaagaataatagcgttcggtgtatatttccactgacgtatttacgaggttcattgtcgttacgaacattctgacgtgccgataccagcggctccccgcgaataaccggcgggttacggtactaatacggcccgcaaaatcaacgagtcccgagatgccggtttgtcatcgtgttttgcatccactaggcccaattaggacatggaaccgatatctatcggggaagaatagttacttgttctatgttattgcattgcttctaagctatttgactttcttccccaaaaaaatgctagtgaaaagagttgaactccccatctccatgcagctcgaaatttatacgaaatacaagaatatcgtggtcgcgtgatattgtagaattaaccctctagaggcatcaacccttgcgctgagagcgtgttcgagtcaaaggcttagcctgcttagcctgtttggctaccttggtcgctcgggcatcatccgaaacccgcttgcgcttagctggcctgccaggatcaacatgaagatgcccattctcggacaacgcgatcgtgtttctccagcgcaggcagcgaagcccactctcgcttacatccagataggtcttggtccgggtggtcacgcgcttggctgggatatcctccgactcggctctatcaggcatatcggctaggtacgccttgcgattcttcatgtacttgccgatgtactcttgctggacgagcagctccttaagcaacttggactcccggttgccgcgcgagtccagccactcaacgagctgttcaattgcctcggggtcctcgtagtagccccattcacgagcattccacacatgtgttgccccttcttcgtgctttttgcgctctgcgggggtggtttggaaatgcttctggtactgcttccgctgttcgtcggtaacgtcgatgaagccggcgcgctccatctcatccgggccttgcacccacagacgaccattggcgtagcatgcctcggctgttgagctttccggcataccctcgtagggcatcgcattgcgctcaaaccaccagtagcgattgcagaagcgatccattccaaggcatcgcgtccgggggcagtcggtctcccgaaggctgttctccacagtctcgatctgctcctggagcttctctatattggccttctgctcgtcgatcttcttcaagactcgctggtattgtttggaccccttgggctgcttcgccaacatctcctttcgctccttttccaattcttgtttccgtttacgctcgagggcccgatcaattcctccgcgtaatgagcgtggtcgagggatatcctcgtcttctgtgtccccgaccatttcagaatccccctctagtcgagagtcatccaagccgtctagttcgggcaccggcgtaggtgacttcccagccttttcaagctcgggttggacggccttgcgctcctggtgcagctgacggagctcgatgagactggaagatgatgttagcggttgagatggcaatggtcaaggattgacttaccctgccttgcgcgccttctgatactcaattttctccttgcgcaactctgtcatctgattgctgcactcttctagataatttcggatggccctagtctccaagctcaacatacaaatcatctggagcgccttagtacgcaaattgatgtcaagtgtttgatactgctcctgcgcggtgtcctgtgtaggctcgcgatcgagaggcgccagatgcttaaggatggtgttgcagacttgctccaagcggggacgaacagatagctggtgcagaagtccaaccatcaccaactgccacccaccgttgcggaaatcgcgtttgcgaagacgatcaatccacccgtatgtctcaaacatatcgccggcgcgatgaatctgtgtcttctcgggttcatgttcgttaatctgtgctttgatgacgactgcctcttccttggccaggcttcctctagtggtcatcctcctaggcttcggctgcagctcgggagactcttcctcggcttcttccttttcctcgtcctcttctgattcatcagattcatcggcagggaagtctgggagtgagatctgaactgcaccatcatcgtttgatgaattgacgagtttcttgagaacggcacaatgcacttcaacgaaaagctcgcagtccacctcatctgatgagaaccgcatagcttgaataaaatcgtcaaaggtgaaagaatccagttcaaatacttcgcagtagacattgagtgtgtcccaagtctccaatagcagccccaccgtttccggctctagatcaccgggcagaaggttctctgtgccgtcatcttcagactcacctacagtcataaacttcagggctggtcgatgtttcttttcggaattcggagcaaggtctagatcttcgataggatacttgattggtggcggggttggtgctcttggctcattcttaatcagcactggtgggagtccagccagcttcctatcgccaaccagtggtggtttggaagggcgcaacgggttggaaggcagaaggaatgatgggttaccattcagcgaccgctgatactcttggtactgcgcctccctcgattttgccatgtcctgtgcagacagtttcgacttcgggcccttgactgcgggttttagctcgggcagctgctgagaagagaagaaaccaaagaagccatcttggtccgctttcttcatcgccttcttctctgccaccttcgcaccatactgcaggtgcttaggcacctcaatcgggatcttgtatgtctctgcgacggatggcttgaccaaccagggggcacctgtccacgactctctggtgacattgtttttgatgaacccgcggagcatcagtttagtgaaagcctttcggtcgcgtgtgatgtggtcctgatccagcagagcctcttcgttttgtcgatctaggatcttgaccagatacctagcaaaagccggtgttttaatagttccatcggcatataactgctctgcgaagttggccttatctctgatggtaccatgaagccgactactatcctcaagcaaaatgagaacggcttcgcctgggtagaagtctgatttgaattcctaggtttgttagatcagtcgttaatatgtgacgggtattatctcacttcatagatttcatccactaagaagagtgccgttagcttgattcggactaagaaagatcagaatagcatacccaggctgtccaccctcgaaactatagagaactgaattctacgcagaatgggttctctcagggcatcggggaaactgttgttgacttcacgcgattcctctgtctagtcgagggttagcatgtgtccatcactaggtatccatgtgataatatacctcactgcggagcgcctcaaaaaaggtcaagcccgaatggcctgtgatctcgcagatgaatcggcgttgtttgtagaagtccattcggtgaaggtaaggctcgtagctagtgaagacctcattggtctctgggataacccagacctggaagggagaaagagtcagcgagaagctctggagtatggataatagaatacacacctcggagctatcatcttcaatgacagtttgtgggaggtattgaaccggtttgcgtttgaataacacctgtccatgcaattgtgtaagcctctttgtctccgcggcatcgaccactttcctcttggcgcctccgcagccattccatcggataaggtaattgcataccatgatgctttaaattaaatgtgcacgcgccagtcggccaagagctaccgtaaacagaatcgagaatcgaacatgaacggggctaaaccaaacgcgatcttggttagcgagtgaagcttgtcggtcgagtgtgcgaaggtagaggccgtgtcggccacgcaatcggcggagttaacgggagttgcgatatagattgcagatactccagtcgctctgcaccgttgtgtagaaaatgggcagtggaggggttggtgggaatcgtcgtgatcaggcgtggtcgcagatcaagaacacgcgaacagtggaatagcgatgccttgggaattcatgcggacttaccggagtagaacgcgtcttgtactgaagttgcgaaccaagcgatttggatagggatgaactggtggaatctcaaaagggggagggaggctgtgaatatttcaaggtgtagggaaccagaaagaagaaaggtagacaaaaaggacggagcggtagatcattgcaggaccgcgaatcagcggtggacgctgattggtggagaggaggagcaagcgggagccaaagcccagcagaaaaaccgcacctgggctttcctcgggaccctcgactctccctcctcccctcgtcatctccgactgtcaattctctcttcctttcttccccaactctgcctgtatttaccctcattcgactcgtctggtccaggagatttcatctacaacctgctcgtttcaacattctcgaatctttctattctttaacccgattatcaattcccagtccctattctcggtcacctcaccgggctaagatcgggacaatcaattcgaactaacgggaccatgtcactaccagctttgtttgtatttttagcatgaaacaccaacctttcagttggattctctttggctttaaatgctgaagtcttatttgttcatacccctaggcatctacctaggtagtcgtatttcatgcttaaattagaactagatctatttaataactatatgtgactgaaatgcaaatagtggagctttacatacatactctatatcatgtactgtctgctaaatatacatcatctttatgactctaaggcaagcagctatggttggcatgtaggtttgatacacctccttcagccacggtgtcacaagcgcattgatcacccagatatctattgttggataagagatactctatatatttgcttattagagacaataagcctctctttttcatgtcatcataccgagacttgtgattgtttagttatcgcgcggctagtcgtgaatcacaaacatgcgatatgtgcccaggtatagtcgtccctcctatttataatttactactttaagaacgggttgcatatgagatctattaaaaagcagcctaaaataaccgattaattactagtagaagaagtgaaagtacatagacaaaaggtatgatcggaaaatgacttccaccacctgtggaaatatataggtctcgtaaatatgcattttcacactagacaatcaaccaagctagtatctaagccaaaaatgtacggaaatacctatgtgtctacacaaacatggctagcaaatccctagactagaagagagatcctcccccatgtttctatctgacctgcatttgactgcaggccaaccatggatgaacagagactaactagattgggcttagtgagaaaatagactccgtgatccgtgggtctgatccacgtggaagcaaacaatgcaaacattctactcctatatcgaatccgagtaaatcccgaagtcaccacaaataaccacaagcagtgtgtagttcatagttgccagctgaaatataaaagggtcttttgcagctaattattatcaatctaagaggtaaaataaaccaccatgaacccaacccagcttccgaccacgccgagggcacaataactgctcatgaacattaatggcaggaactctagccggtcccatccgaatatcaattggtgccccagcgagcagtagataatcagaggaatagagatggtcaagtagagcagcgaaagccggtcgaataggaaaattcggggccgctcggggacaggtgcgactcggtcgaagacgaaaaggaacagcaccaaccacaggaccgtataaatagtcttgagggggaagtcggatgctgtaaacagcagcggaaagagcgaaacatggcccgcaaccgccagaggtcggaaggcgctgaagtagcgacggtccttgagggcgatgagactgaatgggatgataatgaggagaatagctttctcatgtacatgccatccaaagaggaatgatgcgtagccacagagggtgatcgcaccgacaaaggtatcccaacagcctgggttgaaccagaccttgacgagaggaacctatgcaattgtgagagaaggccaaagggacaggaccagggacacataccagttggaacaagaaggtcaatatgaaggtgtactcctttgtaatctccggaaggacagcaaaagaggtgtctcccaccagtcctcgtgtgacactattcagggcactagtgttcacaggcagccctagccgtggagcaactgtagattttcatataagctcatatgtcgtgtgcgccgaaagagatagaggctacttacgggaaatcaatgctcgatcagcgaaggagtacatcgcccagatattcggtgcccagtacgcgtgacacagtcctctcgaaaacggaaacagcctatccttgagctgaagcaattgcccccattgtgcaaatggcccaaaggcaattgcaaagacacccaccacaccaactccaagtttgaaaatattaccgaatcggggccggaaaaccgatttgagactaaggcaataggtgcgcagtagatagacgaagtaggcgagggcaaggtataggtatatgtgcttcatgcatagcagcacagcaaagaggataccgctgtagagaagagtcgattgcttgcgagccaggacgattgataggatcagaattccatacatgaacccattgtattggaagtggatatgatcaatgatgaggagaccgggggatagtaggatagagagactggctacatgcgcagcctgcctgtttggcaaaggaaccgatttgacgaatctatcgaactgcagtcagaattatgttgcatcatcagaaaaaaaaaagccaaaaaaagggtcagggtcgacgactgccataccgactaagcgcatagacaagaaccaactcagtcaaaatcacggttgatctttggaagtagacggtctgccaggaatcatagccaagattcttcacaatcaacatcgcagggtctgcgtatacagcagcctgtgacatcagccactcgaaggctgcaaagaacggtgggtaatcaagtgtccattccgaggatttctaaacccgaagtcaacatcccatgcccagaatcatgcgcccgaccgaacatacctcatagtaccactcttggatagggagagaatgagtgatggcgagccaattgcgatggacctcaaaatcggtcgatttgctgcaacacaaagaaaagcatgttagcaaagctcatatagtaacctcaatgttgtattcccagtccctttaagtcccccttgcagattctttatagtgattgtttgatatctttccacctctccttccgatcttttttgctccggcgaaacgagcgggacggactcactatgcggggaagagcagcaccttgaaagcagctgcaacgatggcgcaatgcgccaatgaagggtataggtcagccattggagctcctgcgcatgatggtgcagcgatgttgaaagccgggaagacgcgagatgggagaatgcgcaaatcggtgaagtgagaagcttcctccgcacgttattttgaggccacgtgatcagatgcggagatcggaggtcaaattaggagcgaaacagctgggcagaaggacagataagtcaatacaacacatacaacgctcaaaggaaacactgtctccgtatggacttcacagacgtcggaatccgccacacgcttctcaacagtgtacagctccatcactttatcgatttctcaccgtcggccgctgttattgcaaaggaggcccgtctctgcgttattgccattgttgtcggttggatcaccacaagtgttgtctccaacctttgcaatcggaagtgtaactgtgactcaatccatagcaagcgctgatagctgctgcgcagagcttccacgaatccatatcaacttcaagcttcaccaaccacacaacatgatgagaacattagcttccctggcattgcttgctgtaggggccacagctcaaattattgagagctcaagcttcggcactggccaaacgttagtataatgtccacgctcagtctttaggttatggttatctgaccttagaccaggatatcaccaaaccaagactctatccccggatgggcaattggaggagagggccatgaaccgcacgtcgtgagtcagcctataacaactgttggagaattgctctaacagctatatagctatcagacaagctcatcttaacgccaccgtaccctggaaacacaaggggatcagcttgggcacaaagtccgtaagtgaaaggcttcgaaccgtgatattggacaccagatactaacatgagtatagagtctctcagtcggaatggtcagcagagctccaattccgagcaagcggaccggaacgagcgggtggaatcctgcagttatggtataccaaggatggccagtcccgtattggtacctcgagcatctatactgtcggccaattcgacggatttgctttagtaatcgatacacatggtggaagagtgcgtattaaccctgtcgcgtattgtcgtgccgtattgatcattcgttactaacctctcctatagggtggtagtgtccgtgggttcctgaacgacggtaccatcgattacaaaagccacaacagcccagacaccttagcctttggccactgcgactactcctaccgtaacttaggccgtccatcaattgtcaaactcaagcacaccagctccatctttgaagtcaccgttgacgacaagctttgcttctcaactgacaaggtatgtatacatcatgtccccatgccgcagccattgtaaatatactaacctgagtaggtcgccctgcccgctgggaacactttcggcatcacagcagccacccccgaaaacccagactcatttgagatcttcaagttcatcctcgagtccgccgcaggccaaggctcgacaattccctccaaccaaggcagcaccccccagcagccaatccccgatcaaattcctaaccagcccgcccaacccatcatcaactccggtacagaagccaccatgaacggcttagctgcccagatcgccgacgtcagcggtcgcatccagcttgcgggcaaggccaccaacaccatcctccaggagctgaagaaccaggcccagaaggccgaccagcgccacgcagagattctccagaagtccctggctcaggaccgccagctcgcccagttcgactcccgactcacgcgggtcgagcagctgctccaggccctccagaccgacctccagagcaaggactacagtggacgcttcaaccagctccacgagacgctgcgctcctcccacctcagcttgagcgagaacctgcagggtcacctgcggagtggtaagttcacttgcttcgttcagacgatatattagttcactctgctaattgcttttctctcatctcatagtcattacggcctctagcccacgcatgggcttcttcatcttcttgctaatcgcgttccaggtgatcctcgcgatctcctacgtcatctacaagcgtcgccgggccaacatgcctaagaagttcctttaagcgcctcatcctgtctaaccccccacccaccctgtgccatctgaatctgtgtcgtcttgagttattgtgtgatggggagtggggggtgtattcatagtattcgcaagtgtgctctgcccggaggcaaccgggatttattcttacgggggaagttatgtagagtacgaatatcattacgttgatgaaaattctctcagagtaattacatttacaagtaagagaaaagtgagatggcaaatattcatttggcctttggcccatgctatcgtacactttctccgagctacccggccacgcaaattcttttttttcagaaaaaaaaaaagccaagcaagataaaaacaacattgaaagaaaaaaacagaaacgtggccaggcagctcggagaaacagattcgagaaaattgacgatcgccttttcggcgaccgggaaaatggaaaaaaaaaacaaatccatgacaattcaaaacgccgggtcctttgatgcgcgcattgaattaaattagagccgggaggctcgctcacttggacttggtgtattgacgcttttgcgcccgctctccggctgatccatggtcatcagcgcgagatcgcttgttccgattgaacacagggatccgggggagaagctcggagtccgaatggtgggactcggcatccgaagatgcgttgggagggtgagaggtgccgaggggaggagaggtgggagcatgagaagagcccagggtagactcctcgtcaatgcgagacagaggcttctgagcaacgggcgaggcaggccccgcagcttcggggatgtgaccttcgccgacagcaggaggctggcttgtagccatgccgaggagagcagtggcagcgtcaaattcttcagtggaaacaggagcgccagcaatcatgttgttaacagcgtgagaaacattctgggtgaactccgcgggaagaccgttctgtgcgatgttgttggtgatcccagcgttttcagcacggttgaggtaatcgctggtgagttgcttggtcaactccaagcactttcgctcgacaattcgggcatactccttttcacgttcgtgatgatcttccttgacagcagtgatgaagttcaaaacgacatcgcctccgaggaaacgagctcttttatctctccagtcttcgtcaaacaaactctgatttgggtcgtcaggaagcatgatgtcacaatcaatgtacgccatgttcttggttcggcgaacacggcgcgtacgctcgttgctgccattaatctccttggtggcaatcatatcgtcaggagtgacatggttaggacacatccacccgaccttggggttagggggatgtgcgcggggaggatcaagacaatccagatggaagcggcaaggacagtagtcgcaagtaataatgggatgtataccttgggatgtaaaaccacacttggaacaacggatgcagtctcccttgttgtcgtattctcggagaagcatgggattcgcgtaaatggtagggccgtcttgcttcggtgctttagtcagccgcggcaggtggggcgcggccttgtagtagcgttgatgcttcaaattccgggcatagtcgccatcaaacacaattccttcatccactccatggaaatgctccttgatatcctgaggaggttggaactctgtcttcttgtagtgtttggagtgtgcaatcaaggtcgagaagctgttgcgaatggagcacttggggcaatgccactctccctgcggaggattcttgggatccaagggaggatccaagcattcgaagtggtatgagttgatgcatgtgtcgcagcagagcaaatcgccaccttttccacattggtggcagtcgtcgctgttctcggggggttcactgtaaggtgtcatattagcatagaactagccgagtcacaccaagaaatcacatacatagaattcggcatctggcgtgcttcgtggccgccagaccagtcattgaatcggaccgagtaagcagaattcgaaagtgaagaaagacttgagactgtggtatcaacagacagcgaccgtgcacgctgtgggacctcagggcccttggccttttccctctgacgtcgcgagacgggcttcccagtcttgcgagcgacagccgaagcaccatctgaatagacagagggagccgcgggctccggaccctttacgagaggtatatcgaggatggaacccggaacagggagagaacgcgaacgattgaacgcgtcgatgtccccatcgatacccgcatcaatgttttccatgtcgtagggatgctgaatggcatctggtggaccgatctgagttcggattgcactgtactggacaacggcttccgagtaagactctgcttcgagacgagcacgcacagcccgcatcttttcctcgtgatcaggatccatttcccactggcgcttacgcttgtaagcattctcgttgacgcggcatggcttcttgggcctcttgagcggagcggtattcgatttgccgctcaggaagttttcctcaacccgaggaccacttgtgtcgcgataaatgtcagagaccttgaagctaggctctgcaccaacagaattggcagctggctggcttgattcgctgcaggaaggaatatcggctgcattggccgtagagcgaacgtatttctgataccacctttgggcttctatcagagaattgttgaggatcgtttggagagcaagttgcagctgtttgtctcctccgtcattttcggagaggttggcaatcaaagagagtttgaattcatcatccatggcattggaccagaagtaaagaaggccaacgacacaccactcgttgtcgttctcgattgagctgatgatggcgaacttcatgacgccccgtagtttgacaagatcatatttgtcggaggggcgcaaaggaagagacatcagcacggcgaggtacttgtgggtgatgtccgcgctcgggagggtaggagaggccgcatcggctggggtggtggtagagctgcgaatagactcatcggccacggtctcggccccagtcgaggttgaggcaagtgccgcttcttcggcgatttcaacatgacccttgtcagtcggcgggctctcaaccccgctaacgggggaaaggcgctcagcttcgtcgcgcgggacgttggtcggcacggtcgcgacgctgtgggcccgttcagacggaggagccacgccagcagctcggtactccacgggcgatgggtattccccgatcggtttcattgtccgatactgggtggtgggcttcgaagtgcccgggggcttcttctgaagcttccgtcgttgcgcgggtttggaagagccctgacggcgttcggactgagtggaccccgtaggggcaggcggaaggggcctggtagggttagtgccacgcgctccatgccctaacttcctggggtcaacgtactgggcagcagcagcatctttcttttccttcgatgccttgtcggcttcgcctatttgaataagttagtttttgctctcatctggaggtgagtaaaaaaaatgtggggtaatctctcagtttcacctgaaagatgcaacatctcgttctccctcatctcagaagtgatcagtgaccagctcatggagatagacagagcaagtgtcattcacatgaaagtgagaaaagggcaatgatgttttcggtcatataaatggctggacttatgaggagggagagtatgttgtctcatccactccagaaccaagtgacagagcaccccgtctcagaagtgactgggccaatgacaagacaatttatgactcgaggcaatggcatggaaaggccactcatctttggtcaagaaatgtgcaggtcgagaggcagatgaggtgttgtatctcagtcacaacgggagcagagacatggtgcatgagacagggtaatgggatagggaagcatgatacagaggagcatagcatgacacgaagtgatctttcagcttgtgggagaccgcgaaatccgcttttcagacgtgactggatttcaggggaggggactaggatagacggagaaatatcacttactcttcttgctgagaagacgctttgagacgcgtcgcatggtagcacgcacggtatccatttttaacgatgaaagtaacgaaatggattgaacgtggggaagaagagagaagaaaggaagaagaagatgggaggttggagggattaaatactctgcgagaattgggggccttccttttgagtcggggctattgagagtgcaaacaggaacaataggatagacagtccaggtgacatgtcatgtcacgtcttgacctcgataccctattcttccaggatgcctacagagaacaatagcttttatattgatctattgatccattgatctattgagtttgcctgtgtataaaactccaatggaagcattggctctctattgtccctaagctgtgtagacaatctgccaggcacccatgcaaatagacaggctctggattgaccacagaaggtgggtacatgtctcacgaggaaatgaacctaggatatgatatactcttcagatacgctaagccgtggtttggtctctagggattcagtagtttcagcagtcgacaggaatgaggcagagatcctgattatattgctgcaccaagactctacacagactgccaagttgtggcagaatggtcccctgttattgctagcaagtagaaaacacctacataggtagcttaggtgtcctaccattccataattcgaaagaaagccacggaagactcgcctaccggtattaacatcgcccttttatcgaatagtcgacgatgaagtgacgtgtacctggtttcaatcttgcctcgaacaaattacacattgagattcgacatgacatgaaatacgaaagtaatagagaactacaatagctactgtctcaatagaatgtcttcaaatagatttacagtacacacgagtacagactggcaacgtcttgatttggtccatggagtctgctccaattgctacaagacagacaggcctccgaggaaaagcgcaagaagaagatattccagcaccaagctcgtccataaagtatataccgaggtttccaaaaatgggttggcattgccagccctgtcgcgtgtcattggaaaaatcaagtatttctcttttgttttttggatagatttcgtatgacctgcagtgaggctcgtcattggatatcttttttgcattcagattggacaaatagtcctacactatatccaagtgtattgcatgaagatgatgaccaggggaggttgttgagagcgttgactcatatttactcgtcaccgccggtggtcttggtcttcttcttgctcttgttcttcttgttgccggtagagcgggcaaggggctgctcgagaatcttgaggatctcctcatcctcgagcttcttgtcagacttgatctgctcgagatcgacgggcttgggagcggcgagcttggtgagaccgttcttggtgatggctgtgagtggggttagcttatgggtccaaatcatcttcacgcaatttcaacggtacttaccaacggtggtcagcagacgagagacgggggaaccgtcagcctcgccagcaggctcgtactggcgcaggacaccgccacgaacacactcaacaacaccaaccttggcagccttctcgtcatcaagctgacgcaagctgaaggggaaagtaccgaacttcttgacaacctcagacagagtctggcgggagctggggcgcttcaggccgtaagtggtggtggtacggcggtgcagggtaggacggtgctcgaggttcttgaccttgccggatcccagactgaggccaacctcaacaccccaaacttcgccgacctcggggacaccgtcaccgcggacaccgttaccgggggagagaatgatcttcttatcgccctcaatctcgttgcggccgaacatccagctcgtggtgttctcgacgacattgcagtcgtaggtcttggcgatcttctcgagcagagaagacatgtaggcctgagtaggggccttctgagccgcggccttcttcttctcctcatcggtaccctgagccaaaagaccctggggaatcatgaggcgcaggagaacctcgttggcgtagtgagtagcgataatgagatcagcctcacggccggttacgggctccttgggggagtccttcttgggaacgacaactgtgtcgcaaacgatggttccgaatccatcgatctgagcaccaagctgaatcttgacgacctcgccggccttcagggtaatctcagcctcggcggcatcggacaccagaggggtgtagggagtcacataggagctaggggagacagtcgtggggtgagagatacctaagtttatatgttacggtaagttcatgtggtttgtctgccactcacggggttgagagtggggttgactaacccttgacaatcttcttgcccttgtagaccttggcgatttcctcctcaagaagcttgtcacccttctggcagatctcgacgatcttctctccctccaagcaaagagctacgtagatattagatcacaatgtgagacaataggaagttcttgcgcaacataccgataacagcgtcaaggacgttgtgagaaatttgcgcagcggtcttgtacttggtcaaggtatcggggttgttgagggtgtaatctagaaagaattgcataattagtcatggtctatgagccgaacgtatttctttgttgcggtgagtgccagcgagctcatggcccatgttgggctcagtgcccacaaacgtcagagctttccaccgcgatggagtttacataccaacaacctcgggtgctttgtcttccgccattctgaagtgaattgggctcgtggagctggaataaacaagtaaatgcaaatggtttcgcaaaaagagttcggattgtaatccgtgtgaagctcgaggagaggaataaaccgagatcgagtcgtgtgcagagcgtcgaggcgtttagcgttggtggggttgggtggtggtcgcctgatgtttcaggcctgtcacctagggctttgccgaagacgtcatggaaatctctcccttgacttcatactgagcgacgttgattcgcgttaagaaaacgtgtaactacagtttatctaggtggaatccatgtttctttcgctatctagaccgtaaatgtctcctctaccccggattccgccacaacccaggatcgcccagacttccagcctccaaccccgaacttctcctcacctgaccagtgtttcccctcttaaacattcctaggaagtacatcgatgtactcgggcttttgcctttcgaaacctacgatccttgctatccgagcgctgatttcataatcgaagaggccaatatgcaacttgaatggatttcgaacattaaaagactcgagtatatcaactgagcccatgccagtaggatagcagaggcttatttctcggagaccaagacaaattggctcagtggcggtgtgaatgtccagctggagatgaaatatatatttagaacttgattttctcttttcgatatatttccgcccttctctctagtattgtagccataatgttgaatcactagccgccagctgtagaatacctgtgaaaagcacagtgactttcatgattgaataccatacctatagtcatcggtgcatcgaggtgactgaaggtggttatactataacttgcctcaggcatagtaatagcctgaggcattgcgacattcccctcactcgttgtaaacccatgacatagaactatccatgtaaccacaccgttgttggttgtttgattctttattcttctgatttcaacactatgagttctataaaacttccggtccgggtcttgacacacaatatccgatatgcaacctcatctcccttcaaaggcgaacgaccctgggcagaacgcaagcaattgctgttgaatgaatttaaatacgaggcccgtcattgtgaagaaaccttcatctgcctgcaagaagttcttcacaatcaacttgaggatattctggctggattgaatcaggacatggagcctggagcaccaaaatgggttcacatcggcgttggtagagatgatggtgacaaggccggggaatactctcctatcatctacaggccatcggtttgggacttactatactgggagacagtgtggttatccgagacaccggaaaggccatccaagagttgggacgcagcctccatccgcattgtcaccattggtgtcttcggtcatccggttagtcggaatgtggtccttgccatgaacacccatctggataatcaaggatctcaatctcgcctcgaggctgcacgtatcattaccggaataatttccgaatataaccagagaagattcccagagatcacgggcactttcttggccggcgatttcaacagcgaatataaccaggaagcttaccaagagttgacaaaaagcttgcttgatgcatatgagcaaatcgaaagctcgaaacgatatggtaaccacattacttggactggatttgggtacgaggatgagccagcctcacgtattgactatgttctggtgagacccaccggggctgacggtcagaagtcgacagtcactggctatgcagtgctagcaaatcggttcgacgatggtgttttgagctcggatcaccgcgctgttattgtggacttgacagttcagacttgaggatgtacatagcagaccacgagcatgccaagacgtccaggaccttccgaggtcacattatgtaacacacacgtggatcacatgacaataagtaaaattggtaaacagggtcataggctggcctggagcccatagatgagcattgggaataacctcaaaatatcttaaaggtagtattataccttattttataattcctttatggtggttgggcatgtagagtgaatggcgcgtttctttacgatcttagacgggtgcggacacttgtaacgggtactctccctctttctcctttgcctctttcaccatcaccccggctttaaaacaacagacaaccgccacagcttccgcagtttagaagaatctctcggggaaagaaactcgtcgattgggatcattgcagtcgattgacgaacaaggtcagctgacttggccccaaccgatccggagcggattctgcgctggaactcccgactggtccattcaaggaacatcggcaacagctctctcccccttcggccctggtatgttcgattgcttcccatttgggttcccagtccataatttcgatatgctgtccctattcaatccgtcgcataccctgaagtggtgacttgtggcgtgttcgggacatgcgcccgttgcgacacgtccatccaacaagctacattgcccaggtgacattggatgcacggtcgcgacggcgatggatagggtaatctactatctgaaaacatctgctaatcacgatttgatcgtatggacagattacatcccataatgctacggtagccgacccgaacctatccctgtcgcgttgagagccactccgagcttccaagatcatacgagtggcattagacgttcgttttgcattcatagaccatccaaaatgccatcccctgaagtgacgggtggctcgctgccctcagagcaatcattcggggaccctcagtcgggtgtccagaacagctctggcgcgtcggacacgggggaacaaggttcagacaacatcgaccttgggacaagccgatcaacaaatggtcatacgccagatacaatcgcagagggaaagcaaagcgcaaaggctatgcttgctgcttctggggtgtcagcctcgtcggaacccggcagtgaggtttccaatggcacgccccgttctaatgggacgcatggttccgtaagaaagagatctcatgatggatctgctgttcaatctacagaggtctccggaaccatggccgtacgcgcccgcgaaacgccactggataagattctcctggaacagtacgttgatcgcgaattccagcagtcggccgcagctgcctggaaaaatccgagtcaggagttacaaaagaataagcgagcggaacgcgacttttatttggcagtgcgacgcgaaaaccagttaaacccagcagcattgtatggcgtgggctatgagggattcggaaacccccgtaccgaccttcgcaatcaacaccctcaacttctctacccaactcatcgacgacgtcccggaaatagaaagacgcgagaactacgcatttcacgacgtgacgcaaagacgcagaatgaacagattgaggatttagtccctattcgcttggatattgattgggagaaagtcaagattcgcgatactttcacgtggaaccttcatgatcgtgttgtgtctcccgatttgttcgctgagaagctggtggaggatatgggtcttgcggtagagagctccgttcctctgacgaggatgatctcccaaagcatccaggagcaggtgatagactattacccgcatcttaacatacacgaagaccctcttgatccccaactaccctacaccgcgtacaaaaacgacgagatgcgcatttcggtcaaactcaacatcactattggccaacacactctcatcgaccagttcgagtgggatattaacgatcccaataattccccggaagaatttgcgttatgtatgacggatgatttatcgctctctggtgaatttactaccgccatcgcccattcaatccgcgaacagtcccaacttttcaccaaatccttatacattgtcgctcacccattcgatggccgtccaatcgaggacccagacctccacacctcattcctccccactcctgtggcttctgccttccgaccataccaatccgccaaagagcatacgccctatctatatgagttgaatgaggctgatcttgaacgtaccgaaatctcaatatcccgagagcaacgtcgccagaaacggtcgatcaaccgccgtggtggccctgctttgcctgatcttaaggaccgccaacgcacgattcgcaccatgattgtttcatccgtgatacccaactcagtgggctctctcgatgaaagcaatgtgatcaagcgtaccggttccagtcgccgtcgtggaatgactggaaaccggggcgatgatgactcagacgagtttgatagcgacgactcctctgttgactctcctgcgattggacccaaccttgcacagggcactgctcgtactagaggcatgagaggcgcggcatctgcagcccatgcggcgcttcgcgccagccttggacagtctgccacccctgaaccggtgtaccatgagccccgagtctcggcccgaagacagcaataccgagaagagagtgtcgatgactctgataagttgatagtgagattcaagatttcgcgcgacaagctggtcgatctgaggaacgggaggcgcattgtctctagcggacaagcatcacgcacgatggcacctccgtctgataaacagtcccgacttcatcctcccccgcgaccccaacaaaccggtgctgttgatgcaccaaaccctccgcagcctggtgtatctggcgtgagtagattttaaccccagtttttggcccatggctgaccctgtgtctatgcagcccccaccacccaactggctggcagctggtctcagcaagttgaaacaatctcaccccaacgattccttcgaaggcgtgatgcgttattccgccgttgataccgaaaccctggcccccgtgacgaatcccaacaacctccaggctggccaaaatatcaaataccaatacctcccccgtattcgttgccacgactgccccggaaagctttacactcccggcccgggcatgacagtggacaattttgaagtccatctgcgcaaccggcagcataaggagcgggtcgaagagcggctcacaaagactggtggcggtggtaccaactccgatggcggaagtgcgagtgccagccctaggattccggccaacgcaagtccagctcttgggactgcagcctctccctctccagccagtgggtctcagccatagtcaatctcgttcatgaagtgatgacaacggcgtcttgtgtgattatcttgtgtgattacttgtctctttcagatcgcttatattcttttacacatttgatcaattcaatccacctacttcttcttcatactcacgaagcctcccattctactcgtgtcttgcataggtttttggtttttcagtgccggaagcgatctatctttatccatctgttgggacccgatgaatctctggggcgtttgtgtttttcttgctttgctggaccatgtgtgtaatagttagcagtttgagagctggtttgagtcttggtaaatattcctgttcttttttctatggaatgatcttgtaggagtgatctcttacgtcacattgcaggctcgtaccttccctataacttataagccatcgcttcctataaaccaattccgcaggacacggaagaactacagtaagactggacgagatatgagtacgagactaccgcctagtactaggctcactcgtccattttctacgcacggcttcgataatgtgtacaatgcattcaaagaatcttccaaccttagccacctcgcagccgcgcttcttcaactacaatgtaaacaagtaattgagaagcaaagttcagttcatttacagatagaaagcaaatatctgacgggaatacgcaaagagacagatattcgtgagaacttcaagtagaaaaaaaaaaaaaaacaaggcagatggggtatacatctcggaccatcaccgactgcaaggaaacagagcacacgatggggacgaaattgtgaaaccataaagaagataatatgggcatcaggatatgaatatgaatatgaatatgaatatcgacggcaacaatccgcgcagtaatcgcacaacttattcggatctgagaacagcaactagatcgataccagacgtctatgtctcgaagatcttggcttaaaactcataagtaaatggccattgaaggtgtatgtctttgatgaaatgagaggcatggcccatatatgagaattcagctgaggggccgtgccaggcaggtcccatatagccctggaggttcttacccacgacgggaagagcgtcgcgaaggcatggttgtcgatagcttctttggctcaggcttcttgacatcgcccttggcagtagcggcctttccgcctcgcttctttgcaggaggcggcgtgggttccttctcactggcctctggctcatcatcgtcggcgagttctttatcgtcatccgtttcttgggcttcttcgttctcgctttcctccgcgtcatcttcgccatcatctttttccttgggtttattccactctgtcatctccatgtcggcatcatcgctgtcgttatcgatatagctgacttccgccttcgcggtgcctcggacgctgcgccggcgagaggaagtggtcatggcatctccagcgcctccgtcggaagaccagccgtcgtcgttctttgatttccgtctcggcttggcagctgcactgatcgatgatgtggacttgcgggcggaacgagatgacttttccttgcgtgcctttttggccacgaaggatttgccgttcgtatctagagactcgggttttcgcttcttgcttgatccgcccagtgaattgtgggtagagttattcctgggcttcattgcaattcggacgacgcgatctagcagatcatccaactcgtctggaaggaaattcttgtcggcgacgtcttgggcttcccggtgattgctcatggaggtgaagagagagctagggacgcccattttcccaggataggtctgtaagatgttggttgcaccggcggcaccgccaagcttgtgctgttgggagtagatatctgcgaaccggcgaatagttgcttgtgccagatcagacagagtgtggaggcgggtggagatctcgtctgatttggtgatgccatcacggaattgcttgacacgctgtccgacgtggaaaatcaatgacatgttgtgttcattggcaactgcggagaggtagaaaaggatatattgagagaagtcggtaaggtcgccgagtttcgttgcctcgtctagatcctcagacgggtaatcagggtggtaggcaagcaaagaaaggagacgagaaaagatcaattccatgaccatggtctgttccgtccgtttcccactagcttgcgcctgctgggcgaagtatgcggctcgggatcgcatccatgtgagcgtgctctcttttagactaggaacaggttcgaaagcaagcaaacaggggacaatgtaccaccggtggctcagatgtgacttctgcaccagtttctttttcaagtggttgatgaatccacttcgcacttgcaacagtgggtcctgggcaaccaaagcgattgcattgaaatctgatggcgtgagcagaccgtcgcagacagtgctggaagcacacagcttaagcaaggactttgcagcgaggaggcgaaggcgcggtttttggcatgcgggggtatcttttttcttagagatttcgccttcaccgaccactaatttattcaatgtttcgtagacaggctttgcgtgggcacggaagtcagcttcattatcggctccgtccttagccctaagacggttgacaatgattttcaatgcccattctttagccttggtctcatcatcaactgtctctgaccagttgtattcagagtctggttcgggtgtacgattggtgagcaggatttgggtgatggcaatcgaaatgatggcatcgcttttttcgtctgcttctctcggtgcaagaaggttcagctgcgacagagcagctaggcgagtgaggaatcgatcagagccgtacgtccacttctcaacgcacttctggaccaaatctttcgcatacatctcttttcggtcagccgtagccataagaattgaaacggcatgttttgcagaatgcggtgatgaactataaagggcatagttggccaaagcctggagaaacttgcggtctttggggagtttagcagggagctttttggcgaaaccagcacaagccttcaaaatatcctcggtactaccatcaccagccgaggaagccttgggagcttgcgcctcgaggtctttgcacatttcttggacttgtgcctctaggacttccggattttgagatgaaatttgcttcaacatctcctgtgcagcattggccaatccgttctcatctgttcgggacaaactcatgatcgccggaatgtggctccgattgaaaatcaaagacccacaacgatacacgagaggagtcaatgtttctagcaggggagagttgtttgcactctggacccgccgttggagttccttcgtggccttgacaacagtgcgataatcactcacagcagccatggtgaagcgaatgagctgatagctccgtcgatcatgcaccttagcgaacttccacaggtctgccgatgcgcgtggggcatctggaaaggttttggataatgactcaataatcttggacaactgtatcttaatcgattcttcgtccttgtcgacgacaccgccattgtacttctcgcaggcctctagataaagcgtcactgccgatctcatcgacaattgacgggccaacatgacgaaaaagactcgcctcgccttttcatccagtcctcggagtagggtaagaattcggcggactcgaatcttgtcaacatctgtctcttgctcgggttcagacgcctgactatccttctgcttctgtgattggttcgagttgcctcgggaaagtttcgttttgatggggggataaggaagtggcagaagcgtctcaaacaagacgcggtcgatcagaatatggatttcttgatcattggtgtagaatgcatcgaatatcttggatggtgcatctttgagaagggacacgacgggctccgtattttgctcgatgtcaccagcagccactgcccacatgcgagccaaaatcttcatggcgtgttcacgcacatgcggcttgcgatccttcactcgctcggcaagaatagcaagaaccgagtctggtgatgaacagccaccatccacacatagtttgttgattatttgggaatacccaaattgcccaacagtatccactgcagccacacgaaccttctcatcaacatcgcggagcatcgaggccatatttctgacaagactgtgttcttcgttttcgtgtaggccagagcctccagctgaggttagcaatattcgccccacaactgtgacccaggcagcacggactgatggtgtcttgtcgagacgacggctcaaaaaggcttcataggccgagttgtggacttgagagaaaggcttaggggatacgggagtcaacaaaacattgggctggggaatggtcttgtcataatccactagtgacactggggggtaagttgtggggtccatgggaggagggggcgggggacctgcaacaccgattccagccgcgaggtctccgatcgtctgagtcgccaataaacgtagggccactgattctgcagagagctctgcttcaatctgcgggataacattctgcaggacttctggacaagcacgccaaagctcccggatcaggcggtgtgccttactcaattctttgatatcctctccctcttcatcagagtcatcgagatgaggtttccgggcatgcttagagccatttgtttgaccagctggaacagatgcatcgatgatgacattgttaaagtactggctgatgtgactggtcattcgttccggacaggcctgacagatagccttcgccatgttataagcggccgggtagtctttcagtagaagcgtgtcctgcttggtgtcaagcggcgcatctggtcgctttcccttcttattggagctgtccatcactcgcgggtcgactcgaaggaattgggcgacgataacgtccaccacctcgggggccaggacgagcgattcatcgatcacagtgacgagcactcgggtcatgtcaaactcgacattcttagctacttcttcgccggtcgatgctttcgaagaacccgaaacgatgtcgaagcagcccgtgaacagcgggataatgagcgagtccggatgatcaagatcgaccatcagaaccacactcttgacctcggcgagagatcccaagacatagatatgctgggcattgtaggcgttggatgggtcggccaaagcggggattatcgatgacacgatacatgtgaatatatcctgatttgatcatagtcagcaccttattcaatcgcatagacaaaacacatattttgcaagatcttccatcgccacaccttcagttgattgcgcgtaaaaggcgcgtctggtgcgcatagtcgcaatacatcaacgatgcagcacgtagcccatgctctgacgcccttatccttgtgggcaagcaagttcccactggcaagttcctgtgacactttccgtagcgattccttatcaatttcctcctggtcgagcttgcggagttcctgcgcgagagtctggagacgttcgaggagatccgcgatggggatggcggagcgccccacacgccatgagagcggctggttgaaggatagactccgaagccccgagtcttcctccacctcggaaggacctgggcgagagcgcgaaggcatcgtggatggtcgcagttctcacatggactggggaggtggagagtttcgactcgggagtttgggtggaggttgaccgcccaggacgcgtcgcacgggaccgcgtcctgccctacaaagttggtactgaaggtgtcatacggtacatgctgagatcatttatttactttgaaaaagaatgtcaaatctgccagtgtcttgggcttacaactcatatcatattaattcatacctatctcacctggggcctaggttgcacttgctggtctaacccgggagccttctcttttaggaaagatacatcgctccagagctccttttaagagacaagggtaccctgtataacaaattctgggcattgctacgtatagctgtgaataatctagaggaaataattctggtgaagtttatataaaaggaaatggcggaattcccccctcccccaccaccaaggttctattgtttccgtttagtggatatcatgcgtacgttttttccagctcataacaaagcagcaggttaaataccatttatactcagatacattgctacatgtatatagagacccagttctagagatattaataatattgattaaaataactaactatgccttcagggatacatgacttgtcataaaacaacggagtagaccttctataacaaaaatcgtcggacttcatagatctgtcatcagaacaatgcaagtgaaaagcaaacctctaatgccatatatgtattcatgcgcctgaaaatgagagataggtggatcgaccacctagaacttaggactgaacttgctcatagcgcgaattctcgaaccgtagatgaagaacaaaataggaatggggatcatagcgacagtaatgaaacctagaacgctagatgcccaagccacacctagattgttgtacatttgtgtagcgaagagcggaaaggcgccacccatggttgagcggatgagagtattcgccgcgatggcggagttggcgaacatcatgtacacatcaataatgtagttgagaccctgcatgaagataaccaggatacctagaccgataggcacgccggcaataacctgcggcacccaggagatatttgggttggaagtccagccgaaccagaatagaccgattggcagcaacacagaggcgatcatcattggcacgaggcgctcttcgggaacgaccctgccatgtttttcaagtttgcgcgcaaaacgagtcttcgtggtgtatatgatgagacaggcaccgagcaaaacgccgataagaatgccgatgaatggaagggcagccacgccttcgtgggtccaaccgcgaacttcgccgaacgaaatcgggtaggcctcgaagaagaggtagaggattccgtaaacaagagcgaggtagatagtcatggcgagcaggatgggctcttgagtaagcatctggaagggtcgtaggaggtacttggtaacgatatctgaaaatgtgggctcgtgcagatccaagaaggcgtgaatggccgagttgccggtttccttgcgaagacgggcagctttcttttgcaagatgactgggccgtaggtctcgggaatgacgaagagagcaattagaccgaagaaggaggacgcaattagggtgatccatgcggtccaacgccagccaagagatgaatctgtgatgaagccaccgctgaagaatattagtgtctggatagtgctttgagggatgtctttaaggggtattttgaagagacaatttgagtacttacacaattgggccaagaacaggtcccatgaaagtagctgaactgaagagagcgatagccactgcgcgatcgacggggtcccagatatcagccagggcaccgccaacgacggccaaaggagagcagccaaagacacccatgagaaatcggcagaccaggatagtttcgaggttcttggcgacagcgacagggatctggaagatagcgaagacgaggtagcctgagaacagcgggatgcgacggccgtatagctcactcagcggtgcccagagcaggggacctagagcgaaaccaaacacaaccagactagtgccgagaatcatcacttcagttgatacattgaactccttcgcagtcaccagggtcgcagtcgaaaagacgctggatgcgaaggtgatccacacagtcataaaggacatggtaaatgtgatgatccatttgcgcagattgctgtagttctgggggttgtgagggtcatctttgccatcccagtcgacaaggttgggctctgcattggaaacagcgggcttttctagggtgtcgactgcgttctcgacatctgtttcgttcttctcatgaatagcgttggtgacgtccacctcctgttccatgctgaggcgaggtgtagttgtagttgaatcaaatggtggcggactcatggttgctctaaatacctatgtatataggtgtatgtgcgagacttccgccggtgtgttatgagagaagacaactttgggaaagaacattattgagacaggggccatatgacaatataacccccccccggaggtcccagaagggaataggctcggagctcaagacttccaaagctttgtaaaaaaaaaaggttgtggagaagctcattcggtatcggccgttcgctcctccactatgtccgcgatgtactcaaccccggatacatcagttggaaaagtcagattaaacagcgtcatgatctaggtcaggccaatgagagcctccttttttcatagagtccagtcgatccctaaccttgataatctatagccacctgggcatgtcacctagatgatcaaattatcttgatatacttccatggcgtcagtatatttccatgtggcgacgggtacgcaaaattacagaactagaaaaatcctgaactccatggaagtgggaaatggaccagttaaaagcacgcaaacgtacgaaaaagcacgaaattggttgcagttccggtccaactttcgctctggtcgctgtgttcgctctcggcttcaatttaaaaccgaagaaaagtggagatctcggcttcgggccaaaaactgaagtgccgagatttatatctcgggctgaaaggattgtccgagagattatcattgtctgagctagttatgtagtttgatgtatatgattgatcatataatcatgatctcataagcaagcacggagttagaacaacgggaatatctcctaggtatgtccggctactgttcttgcatcaacaaagcattacgaggacaagaaatacctctacctctgcggagtagataatcatgatttcaaggttgcacagtcaagaaaaggacatgacattcattacacgacatgaaacaacataaaaagcaagaaagacgacactacaaacactacaacaccaatgaacgtagagatttctctgtattggctattatggcacattgtatgtgggcaaaaacaggaagaaacgaatcgaaaaggaaaccccagcaaccaggcccgcatctccaccacgcaaaacgatctattcataagcgaatccgagcgcagaaacccgggcatgactgaactgaggaaaaacatgtcataccaccttctagcaaaagaagcgtttaatcgtagaggctgtcgtcattgccggcttcgccgaaggtatcgttctcctgaacttcgccagcagatgggaagcggaagaagctaccgcctccggtgttcttcaggctctgggcgaaggcctcgtagcggcggatctccacgtcgctaacagagcggcgggcagacttcatggcctcctcgaagtgagcgcgagtgagctcaggcacgggatcttccgcttcctcatcctccattgtgatgtcctcgccggcggcttcgcgctccttttggcggtcaatgtcggcggagatggcctgcttgatggcgagcttaacggcacgctgtgtcacgaagccgagatcggcaccggagaagccgtgggtcttgctggcaatgtaagcaatatcgacatcaccggcgacaggggtcttgcgaagctgggccttgaggataccctcacgagaatcctggtcaggcaagggaacgtagaccagggtatcaagacgaccaggacgaaccagagcggcatcgagctgctcaggacgattggtagcaccaatgacgaagacgttcttcttggaggtcataccgtccatctctgttaggaaattagtgaatattcggaacaaaatatagcaattaacagcggagacttaccagtaagaagttggttaacaacacggtcagaggcaccaccggcatcaccgacggagccaccacgagacttggcgatggagtccaattcgtcaaggaagacgacacaaggagcagcagcacgggccttatcgaagatatcacgaatgttgctttccgactcaccgaaccacatgcttagaagctcaggtcccttgacggagatgaagttggcagcacactcattggcaacagccttggccaacatggtcttaccagtaccaggaggaccatagaacagtacacctcgagaaggcgagagaccaaacttctggaacatctcggggtggtccacggggtattggacactttcgacaagctcgcgcttgacctcctcgagaccaccaatgtcgtcccagcgaacgttgggaacttcgaccacagcaacctcgcgcaaggcagaggggttggagacacccagggcaaagcggaagttctccatggtgacaccaagagcctcaagaacttcggcatcgatggtgtcctcatcgagatcaatgagatccatcttctcacgaatctgctgcatagcagcctcggagcagagggaagcaagatcagaaccaacgtaaccgtgggtctcggcggcaatggtctcgaggtcgacatcatcaccgagcttcatgttcttggtgtggatctgcatgatctcaagacggccagttgggtcggggataccgatatcgacctcacgatcgaaacggccgaaacgacgaagagcaggatcaatggagttgggacggttggtagcggccatgaccacaacgttggagcgggccttcataccgtccatgagggtgagcagctgggaaacaacacggcgctcgacctcgccgttggtcttgtcacgcttgggggcaatggagtcgatctcatcaatgaagatgatagccggggagttcttctcggcctcctcgaatgctttgcgcaagttcgattcggattcaccagccatcttcgacatgatctcgggaccgttgatcaggaagaagaaagcaccagtctcgttggcaacagcacgagccatcaaggtcttaccggtaccgggaggaccgtacataaggataccacgaggtggcttaataccaatggacttgaacagctgaggatgacggagaggcaactcgaccaattcacggatctgagccatctgcttgcggcatccaccaatatcatcgtagccaacctcgttgaggttgccctcctcatcctctcgttggatgggctcaccctcgcagtgaataattgtgtcctgggcaacaatgccgtattcgggagggtcgacctccacaaccttaaattcgatttgtctcataccacctcgtactgtgaacaggtcaccctgtcggactggacggtaggcctcgcggaagtagggagcaaggtagacatcgaagagagagccggtcagaccctcaatcgtatcagcgatgggaaggacggcaatgcgcttggcctagatcacgagcataaaattagccaatagatcatggtaaaagatgacgtggaaatgcacaacttacgtatttgatatcggggcaagggtgcacagtgatcatgtcgccgtgcttgacacgaaggttgtgacgcacaacccggttgatacgggcgcttccatcatcgagatcgtcatcggccaggacgatcagcacagtgtccttgcgcttcttacccttcacgagaactgtatcaccacggaagagctggagggtctccatggtgttgttcgagagggcaataaccgagttatcatcgttaacggcatcggtcacgctgggtgaaaactgtcagcttcttgcctccaacagatatctcttatcagctactcacatcaaggaattgggcttcttcttctttttcaagatagcggtggaggtatcgagctcctgcaattttcgtcagttccgagggcctttgtgagctgtcctgtagcctatgcttacctccttcttctcggcgcctgaagcgtccctggagtccagttagcatactcaatagtcaagagagttcaaatgaagcgtactgcaagtggaccctcttcttgtcatgcgtgtgatccggctcggaagacatgatgggcgtaaatgaggttgtggcggtgatggaagcaagcttgagtgaacaaaggtgtccagtgcccaaaaagagtcggagcgagacacggatttaaaatggaacgagaaatgagtactgaaaatgaaaaaaggaccgatagatcagaatcagagagcgaacccgatgacggcaaagtggagatagaggcaggtaacaggaatgatgatgttgagcttcctacctctgctcttagaactgatgatgatgacttaagcccggtgcttatgtcatcgcgttgtccgccacaacgaagcgcatggaactcattcgatcgggagccttgatgcctggggaacggccaacagtagatatggttaccaaggtccttacaataatacattcaggcgagaatcttggaacgattcaattataactacagcaaccctaaagagtaaatagaaagttcatggtgcacttgcttcagagttgaagaaattccaactctgggtgaccggttaagacaaggaatagatccatagcaatgccggccaacggcgagtcttctaagtcatcggatgaagacctatttggcctgttcaaatgctcaaataatggagaaaggtcgtacacttagaagcaagtgatatctttagttgtagattcagcaaaggcttggatcgaaagaaacgccctccaaatgttcaagccaggtctatattccgaaaactggtgtaaacctagaaaatgcaaagccaataacaaaccatgtgcgctgtcaacatcaggtatatatgcaagtaggaggatattcgttacaaataggaaaagaaggaaaaggccgagaaccaccacaagtaatctaatagctatgccttgacacttgcggttccagcccagcagtcatggagactccaagctccggcgcagaagctgataagcccggtcaagctatcaggaataccgatgcctttctcgagacaccagtgcagacacaagggtgcccagatgacgttgttcaccatgctctttcgccaagcccggatctccaaacgcagtgcctcgctatcttcggccttggtctctttagtctcgaccgtgccggcagccgctcgttgtgcggctaaccgttgtctgcgtagcacactctggcgccagagcacaaagaactggaagaagatgtgcccgaaccatccacgggtactccagatttcccatttggcaacgccgccatatttgtccacgaaccgcttcgagaccacccccttggaagcaagatagcccacgttctcgagaagctggtagatcacgtttgagatgacctgcagtacggttagggcgtggagaatggggtcggctggcggcgatttgagggtgtcagctccccagatccacaaagggagcagcccgaacagtcgcaaattgtatctcgtctccgatgcgagggaggaaagggccgcgaatttcgattttgacgatgcgggagtgacgttcttggtgggtacacgaccctttagccgcgcaaggatacccagctttgtttgcaatgctatccagggcgctgatgcagtgaggtggtggagcattgaggcgacatagttgatagtcgctagtactcgctcttgcccatttgcctcggaaagtagtctgcgggagcggtcagcgatattcttgccgcgccccggaacataggattgaaggaggccttacagatccagccgacggattgtcacatcggttgttgtcaaggcggctagcagctgccgtttcgcgcatgagctcctggcgggtgcttgcccaggcggggcatcagtcgcctcgcctggaaggtgttcagggtcggacatcgtgtatgatgaacataagaaaaagcgaaataaaatgtggaggtggaatcgcacaagcggaaccgaggctcggaacttgaggaagttcgatctaatctccgagggtcattattccccagcatttcggtcatctgacatgacgttaaccatatcttgagtaaccatacggagtagttagttagttgactaattagtgtataactatatttttctcgtagctatcttgctggcttatattaaagcatacaaattaattaaagcctactgacaccttgatccgctttacgtgcttagttctatactatggcttcacaggatacctaatttaacatcatttacatagtctacatctttctagtaacttttacttttacttaaaatcatgcttggaaattcttcatttcgggggaaatcccctagtcctcacatgtggaatccgaattccaccccatcctcctctcacatgccgctcaccccccgctcaccccggcctgacttcgacctcacctccacctcttcctcaccccggcttcaccctccctcactcccctcccctctccccaccgtgaatgtagcaatgcccaaatgggccatgaataaccccgaagggcaagaaaaacaacaaaattgtgaggaccctagtcctcaccgaagggatctgccgtcgatccctgctcgtggtcagactcacgctgccacggcgaaggcaggattcgccagtccgtttggggctggaagtcccaatcgacggtgctcgtccttggtggacgattggcgaggaggttctccaatcgtctgagctcccgctcgtgacgttgtctctcacctcgctgctcgcggaggtcatgtaaccgccgacggaatcgacggccggtgtggcgaccggcgaatccgagatgttgccgagcacgaccaaggcgaccggacgactcatgattgttgtcacggcgcgattggaagtatcgtcgaatgttacccacaagacgtcgaatattgcccacaagaccggtgggtgtgccctcgtcggagcttgcataagctgcataggagtgatcgctcgcagtggtgatgaacgacattcttgccattgaacggccgtttggatcctcgacctggaagccagaaggatacggcgccatgccggagtggtcgctggcagtggtgatctctgacattcttctcatttcataagcatcctcaacctggaagccagaaagatgcggcgccatgccggagtggtcgctcgcagtggtaatgagtgacattcttgtcattgaatagccgtttggatcctcgacctggaagctagaaggatacggcgccatgccggagtggtcgctggcagtggtgataagtgatattcttgagattgaatgacccctcggttcctcggtgatgaatgaggtcgtcacttgaggctcttgtgactcggcctggaagccagaaggctgcggcgtctccgcggaacggcgtgaaggcatgactggtgtcatgtcgggatgtgtcgttcctgacagaaatggtattattgcggatgagaaagcacaagaaatgagatgtaaggactcgcggtgtgctgccaggagccttacacgcaggaaaggagagatgcttgatacttcacccggcgactggaagccgaagaagtaacgcttgattgcgaaccgacaaggtcgccggtgtacggccagaaggcctacacgtggggaaaggtacttgatacttcacctggcgactgggagccgaggaagtacgtcagtcacgatccttgagtgtgaactaacaaggttgccggtatgctgccagaaggcctgcacacgggaaagacgttgcaatgtgatgagaagtgataaagcagatggaattaagatgaatcaatgaagagaaggggtgaaaggatgattggaagaaatgaaaggatgggtgggagagaaggaaacaaatgaggagcggtggtgttcaagtactccaggcgtgtggtcgccataatttggatcgcatcgtcgctgactcgttcgttgactcgtcggggccagcggtttatggaatgagctccatgatcgcatttttccagcgacaaccccgacggcgacctaggtgaggtgagccgcgtttacgcggtatgtaacccattgattcctttgcacatactgctcaaacagcataggtctaaatcgcagagcgtaactataatgataaacagttgtcattctgacttctgtttatacagaatcaccgatacttggcaaatgttccatccatcacattgcctggttgctgctcactggctcatgtatagatttggctgaagtgttatattccgacactggaccgagacatagctataacaagcttgaatggcacaagggcttgctttatgtctatcaactattcgggggatgccgtcaaaatacgttctgcaaccatgcagggagagatgtggtgattcttattgattaccttacctctagagctctgttacctagaagaatatgggctaatagactagattttggattgccagactaccggtttgatagatgataaagaggcatacactccgtagtcacgggtaatgaagtataggctatgtatgttgtatagaactcactacaggtctaagccgacaaatcccatatctctacatatataattcatttagtcttgagcgactaattcagctacagaaaccacaaacatagaagagagacaatccataagcctaggggtgttaaaagaagtgataaccccgtgaccatgaaagccctggcattgcaccaaaaacgacaaacagtgaacttccaagattcattatgatcaggatctaaaaaaaacatagatctatataataaaatatacagcataaacatataaaatacatacaacatactccgtatacaacgttgttaatgataggggtaaaatcgtcaaagcccccagatccaaccaaaagccgtcgggggtttccgatgggctccgccaatggatctcgccggggatccatccaccgattgttcgtatagccgtctcgatttcctggatatattcttccgacagaatttatttagtcggagagtgattcaagggagatattttgtgtgagttatatattgacggcctcggctgtcctcccccatatcccatcccagcccagccaccctcggaccgacataaacaaacacgccccccccccccccctaccccccctattttggnnnnnnnnnnnnnnnnnnnnnnnnnnnnnnnnnnnnnnnnnnnnnnnnnnnnnnnnnnnnnnnnnnnnnnnnnnnnnnnnnnnnnnnnnnnnnnnnnnnnnnnnnnnnnnnnnnnnnnnnnnnnnnnnnnnnnnnnnnnnnnnnnnnnnnnnnnnnnnnnnnnnnnnnnnnnnnnnnnnnnnnnnnnnnnnnnnnnnnnnnnnnnnnnnnnnnnnnnnnnnnnnnnnnnnnnnnnnnnnnnnnnnnnnnnnnnnnnnnnnnnnnnngaacaccgcccccccccccccagtctcaccccatcgtgtcttcccattttctccacttggcatcttatcatccattgcatgttaatcccattcacattattaacttattttaggcgcgtgtgtaatctgaaaagctctcttaattcctcctgaaccctcctgactcctgccctcctccaaccccctccgatccccacaatgtccgtcaagttccaagaggagaccgtccgcaccgtcacgggcggcggcaagtctgaagacctcgcgcatcgcgtcggtgagcgattgaccggtggaaagacagcggctgggtatctccaggtatgcagcgcctacccctccaataacatcgagccaacactgatccggggaatggatcgtcaataggcatacctccttcagctccagaagaaccctctgcgcacgaagatgctcacctctggtgtgctctccggtctgcaggaactgctagcttcgtggatcgcccacgatgtcggcaagcacggccactacttcagctcgcgcatccccaagatgtcgctgtacggaatgttcatcagcgcgcccctcggccacgttctcatcgggatcctgcagaagattttcgccggccgcacaagtctcaaggccaagatcctgcagattctcgttagcaatctgattgtacgtcgtcgctgcgatcacctgtcctgagattcgctaatattcccccgttccccagatctcccccatccagaacagtgtctacctgacctccatggctattatcgccggtgcgcgcaccatccaccaggttcgcgctaccgtcaaggctggcttcatgcccgtcatgaaggtcagctggatcacctcgcccctgtgtttggccttcgctcagaagttcctccctgagcacacctgggtgcccttcttcaacgttgttggattcttcattggaacctatgtcaacacccacaccaagaagaagcgtctggaagctctccggaaggtatgattttatttcttggaatttgcgacttgattgctaacgactcggcagcgttacgaccagcgtcgcgaccccagctacgagaagcgcgacttcccttaaatgggccgagtccgcaattgactgcaaatacacccggacgcgtcgaagacctatgtgtgtcgtctcttccggcttgtctgctgtcacttggttatcctttgtttactattctccggtgtcgatctaaatccatgtacacacccccgtgcatcttgacatgccgcagatatctcccccttgatgttatcactcaacctcatgacgaatggctttatatctctgttttatttcaattccaacccttgaagatcggtatatatatcttcttttcagttgagctagtcgcgccgttctacctctgctcatctataccgctatatacatacactagtcgggatagctataatcgaatgaactgcaactgcccttgacatgaaaacggcacaatgtggccattatgaattctgtcgtaactatgaaagatctgacacacagggtgtcaatggatgatacaagtgggtgggcaaggtacaagtagacatggccagcccacccgaaaatgagaagacacaaatccctcacatccaacatccacgaagaggccagaggctaccttattcaacctccatctctgaggcctttccccgcttagcctgaacccaggcaacaaagtcatccagagcaccgggccaagccccatcaggactccaccagcccatctcctcatcttcgagactcttgcgcataaacacctcaacctgctcccacagatccttgttaacaggcttcttcccgcgctcttcgaggaactcgatccaccaatccagccacggggtcgtttcggtgttccaggcgacaccaccatggtcagttgtgaagaaaagacgccactgctcggcggcgatttcgaattgcaggttgcgctgtccttgcatccgtgagagcgggaatgcgtatctgtagactcgtcggaagaccgctggctcttgtgggatgacctcccggaggtacttggcgtacgcttgcattttaggcagggtgtcgcagcttgtgggttgttagattggataaataacattgaggatgatttgagtccgggttgaagtgggttttcttcgttgatgttgtacttaccgaacgttcagccatccgtccctccatccctggcgggtgaactcgcccatcgatggtgacttgagtagctcggcgatggctaggcaggttacttcgtcgagctcgacattcaaatcgccgaggtaatctatggctcgtgtgataccgatggtatctgggctctcgactgggtcatctgggaagacatgagtatttgtataaaatcactagtcaagaatgagtaaatacctcggtagctttcgaagagctttgtaaattcggaagtcacaactgcagcagtgccagccgcggcggcgaagaaactattccagtgataacgttagcatcgaagcatttcaagagttgtccatgtatgatatcttgagagcgggatggtcaggtatatggtcgtggggctagggaagggcaatcacttcttcttcgcctttctcggcttcttgactcgaggcatttgggacgatgaagtatgtagtgagagattcaaactttccccaagtgagacttaggaaaggctgagaaggaaagatgctctagcgacctgctagcatcttgggacttatgtgcaggtaggggttggagacaaataaaacaaagcgacacaaaagtcaggtacaattatgatgacaagcacttacgcgtcaagcgcgggagccaaactccatccacatgctttgaggaactatatcagaaagttagtcctttttgatcccacgtgaccggatagaagcatctcaagatatccaagcagaccacacaggagagaatatgccggtaaaacatgcaagttactcactttcacagcaacagactcctttgtccgtgtacagctgacaaactcagcgattagatgcttctggttgcttgtgtatggtggcatggtggtggttgacaatatgtgtgtccactacgcgcgggagaaatgaaataagtggtgaaaacacgcggggggctaaaagcaccagatttgtagtgtgcgcgtgagagaaactatgctcggctaagaagttacgagaaacaccagggctatgaggactgtagtgagttatcatctggagctgcccgtgatcatggtgctgactcatcatgtcctccaaacagtcctaatatcaactacaacccgggctatacatccatgaatagacttggcatgaggttttattttcattacattggacatggatttgtgagtattcagagtatgtattttcatatagtaaccattacagagaagtttgtggtcaacatttgccatcaattcatcacattaggagcaatgagcacgggattcgatggtaaaaagtacagtcaacttttgtaagatcagatagatcaggtagaactcccaaacgccttttgcaagttgcaaacatgtaagattcggtgttcgaattcgtttaggtggtgaacaacgtatcctcctattatggatgttagcaatttgatccttgataagttgaagatagatccaactcacttctctgaggtactctcctgcgtcggcctgttcatttgagttagccaatgtaagtaaaaacctagagctgagctccacctacctgacgatggatcgcgatactggtaggatctaattttgcgatctgcgcggatgaccttgctgtaactccgaatcccagagggacgtcgttggagtccagaatcacaattccctggttttctgcgacatcctcactagaagacggtcagccttgaaaaaggatactcatttagatgataaccaacctgaacctagccacgtgggctttcaaaaccgaaccgccatacaacagaggctgaaacttgttagcagggtacagcagaccctatcgaagttgagatatcaagcttaccatcactccgtttgctttgatccagacctgtgccagagatatagagttagcatgcctggttgaaatgcttagattgtgatacgtaccttgtatcgggcgtgttgcgccaggagatccagagctgttaggttgatgcggaacttgccagtctgccataatattagcatcactgatcagaatatgaacagagcttatagcactcgccttagtgtattttcctatcatagtgcccatgctgagaagctgatcgcgcgggaatgagatgctcaggttggcaatctccttgttcacgtagtaaacccgggatccttgcaagcggaaaacactcatggatccatcttcggctggggtaataagagaattgagactgcggccggtataggaagctagcttcgtgaagagcgtccgtgtctcttcctaaaagcgtgataggttagtcaaagtaatcaatggtcattgcatttagtacgcacttctgtgagggatctcatattggcggatatgaagctgaaaatatggcaaaacagttgagtagcaacgagcttgtattgtcgggaggtgaggagcaagaaaaaaaaccaatgtcgggcaatatctcaccgccaagaagcggacctgaaatttatagcgatggaccggacatgaatagccaatcagagcaatgtttgtctttccgcctagaattttcgggaccgccttttcactctaaagatattttttactattctccgcaaatttcaccgtcaattccccaaatctccagctacaaaatggcgcgtggtccagaagtgaagcggagacgattgagtcctccagccgatgttgaggactcctcatcgcgctccaaagccgaccaagagtgggatgttgagcaagactacgaacgtcgcccgcgcaagaacaccaagaaagctggcgagaacgcacgattgccaatcaaaacatctgaaggctttgtccaggccgaagccgagcctgcagaccagggcgaggaaaccgacagctttctgggtaccgatgatgacgaggaggatggctctgagggcgaggacggagaagaatctgaggaagaagcacccaagattccggtgaagctacaaatcttgcaggcaaaggaagagctagctaagatggcaaccttgatcaacgaagatcccgaggagcacatctctttgttcaaaacgatggccgagatggtgtcgaaaaaatacacacctgtcacagttaagaagctggctctagcctcacaggcggctctctacaaggatgttattcccggataccgtattcgtccattgagcgaagaggaccagactggcagggtatcaaaggaagtgcgcaagctccgagacttcgaacagtcccttgtggcaggatatcgagcttatgtccagaagcttgctatgctggtcaagccatccaaacaagatggccccacagatgctggactgaggagcttcgcgatttcgatggcttgtactatgctcttagccgtgccacacttcaatttccgcagcgagctcctgaagatcttggtgaaccgccttgcacggagaaaacttgatgccgactatgttaagtgccgtgaaaccatggaggaagtatttgccaaagatgacgatggaaccgtttccctcgaagctgttcgtctgctagcaaagatgttgaaggccagggacttccacattcaccccagtgttttggacacattcctccatcttcgtttgctcggcgagttccacttgaaggcgtctcgagaccgagtggaccgggaagaagaagaagtcccccatggaaagaagccaaagcaaaagcgtgaattccgcacgaagcgagagcgcaaggttcaaaaggagcgaaaggaagtcgagaaggatatgcgacaagcagacgcagtggtatcgcacgaacaaagagacaagaaccaggccgaaacattaaagcttgtattcggactctatttccgcattctcaagctccgcattcccgaactgatgggtcctgtgcttgagggtctggcgaaatatgcccatcttattaaccaggacttcttcggtgatttgctcgaagctctgaaagacctgattaatcacgcagagcgcgaggaaatgggcgtagaaggcgaccaggaggtcgtcaacgaggaagacgacgaagatgaagacaatgtcacaattgccgaaagcgcagcccgggacgctcgccgaaggacgctgctctgcaccgtgactgccttcgccctactagaaggccaagaagccagcaaagccgccgcaggtctccacctcgacctgaacttcttcatcaagcacctctaccgatccctctactccctctccatgaacccagacgtcgagttcaacccagacacagccctccgcctccccgaccccaactcctccgcggaaggcaaacagctctctgagtcccgctccaaaaacaaggtcaacttccagaccccgatggtcctcctcctccgctgcttgcagccaactctgttatctcgcgcacacggcaacccgcccccaagccgacttgccagtttctccaagcgtctgatgacgacttctctccagttgccggagaagtctgctcttgcaacacttgcgcttatgaaccaagtctcgaaatatcatggtcgtcgtatctcttcgctatggcatacagaggagcgcaaaggtgatggtgtgttcaatgcttttgctgctgatattgaagctaccaatgtctttgctggtacggtgtgggagggtgaactgttgcgtgtgcattactgtccacaggtgagagaggcggcggttgagattgaaaagatgatgatgtcttctaagtaaatactgtaaatactgttttgaataattttacatgcatatccagctacaatctactctacttggaaatttataatcaaacatcttcattgacatgctaatccacacaggaaatctcacaaagctggccccatgtcctccaaatccaacaaagagatgagagctggttttttggggggggggggggggggttttggttttccatttttttttgtttttttttttctggttgtacttgcatcatgttgagcactggcatggctcgcaagtaagcgagcttacctgcgagcccccatccttgccaggctcaactgggggacacgcggcccgaaggctccgcggtccggatcgtggagatcccgacctcatttggctgaggccgggacagagtgtgaacgtcggcgagtgggacgggcacatcaccgacagcatcccgggggatgcgaattccctaaggaatggtgggcacagagggggccgcctccccctcggtggtctccttcgcggaagaagagctggcggacttcttcgagcccctcttcttcgaccgacgaggaatcgaactctttgcagagctcgatcctggcgaagtcattgtcgcggacgccgcgactggtactgggggagccgccgttgctggcgaaattgctccaaccccagaggacacacgagtcctcagggtcccagtgggtgcaacggtatcccgtgcaggcaaagggttgggtggaagaatcctttccacgtcatcagacatcttgagtccgtgctcatcttgcaggactcggagagcagtgttgctgcggatcagcatctgtctcaagtagagaagctgctttccgtggtcttcggtctgagacccgatctcctcaatatcctcgtcgatctctttgttctttcgacgttggtaggccaggaattgctcatcggggttgtccgttcccccgaggcacatgtcgactttggcactcaggttaccgaaagacgaggtcagctcgttgatgtcgctgcgcatgtcgtgaaccacctccttgatttcggcgacctgttccttgaggtcgtgaacctgctccttgacgtcatccacgtcaagcttcgccttggtaacctcgaaagacatgtcagactggcgctcaagttgggcatccatttggtccttaatgtagtcccgggtcacggtaacaaagtcatcgactttctgttcgagcttgttgatgttgtcgatcttctttgacagtcgctggatgtctgtctcataacggtactgaagagatcgaacagcctcaggaagatccttgagagtcaagttggaacgtggcacggtggtaagactgacaccgctagtgcgctccatagaactaagactgggacggtgcatgtcatcccttctgaagatgggtgcgcgagggctgggtgtgtgaaggtcgtatctaggagacacggggagtggcttgttgttgccatccggaaagtcagaatttccagccatcttgggtggagatgggggagcagaacaagagcgaggtttgaattcagtcagggtgaggttgcccggtcgattcttcaggatggagattggaagaggagggacaggggggatggaagaagaacggagagtggtagcacggagagaagaacgagaagggtgggaagaaaggtgggaggggaattttccttgttgctgtgcgaacgcgttacgtttgttaagcgaaggctcaggcagttccaaggactgcgaactgctgcctgcgacactgccagaaggcaaaccaaccttaggattggtcgacttgacaggcgcagacactgggactgcagtgacagtcacgtcagaacggggagatgccagtgggttacacatgtcgggctcgtcgaattgtacgatctgggagagggtgctgcgacgagaacgagacgaagttgcagaggagggagtgtcagggcggccagtacggnnnnnnnnnnnnnnnnnnnnnnnnnnnnnnnnnnnnnnnnnnnnnnnnnnnnnnnnnnnnnnnnnnnnnnnnnnnnnnnnnnnnnnnnnnnnnnnnnnnnnnnnnnnnnnnnnnnnnnnnnnnnnnnnnnnnnnnnnnnnnnnnnnnnnnnnnnnnnnnnnnnnnnnnnnnnnnnnnnnnnnnnnnnnnnnnnnnnnnnnnnnnnnnnnnnnnnnnnnnnnnnnnnnnnnnnnnnnnnnnnnnnnnnnnnnnnnnnnnnnnnnnnnnnnnnnnnnnnnnnnnnnnnnnnnnnnnnnnnnnnnngcggggccgcggggaccttccgaatcggtgtctgttaggaaatcaagtgtcagtgactcatgttaacccttcttgcttcgaaataaacaggaagtgaaagccttcaattgaccatgtgagaccaaagtcatagatatctctcatgtttttgagtgtctctttctctatcgtttctttcgaggcatattctatgagcaaagaatgattcctttacccacaggacttgcttctatagaaaggaccaccatagagaggggtttgcctgtacagagccaagcatctgacctcaaggaatcaaccgcaataccaaagaaaggaatatgattcaaagaaccgatccatagctcaagaaagagatctgattcaaaagaatcatgccgattctatagcaaggtacccgattcccaggagccaagctgatgtccgattctgcaggcagaatggcccaatccaccctattctcaagaaccggctcaatctcacagagaagaaacccaattcccaagagccaggctcaaccccacagagaagagacctgattcccagaagcgaggctcaatcccataaggaggagacctgattattgggagccaggctcaggctcataggaagactaggttccgatgaaaagggaaaaggcccagttccatggtgtgctcgatagacacggggcccatgtccaccgaaagagacactccatgaggtaaaaggcgatgaatgcttcaaaaatgaagggaatctactaaccttgactttttctcgccattttcctgatgttttccagagcaaatggtgaaagttgtgataatggttgggagaaaagaagaaaaggaagacgtgtgtgtggcaacaacaagcgaagaggacagggtcaacaaccgcggacacgtgcccgagggactatgatgacaaccaccattgagaccgaagggaaggcacggctgcctaagaccttattatggctcatatacccatatcgaaggagccttccacgtgggcacttcatggcccaggttctctgtatttgacatactcgaatcgaagatacggacaccaacacaccagcaacgaaacgcaaaggcaaagagaatctctacctaaagaaaagctggcaaagtcgcaagtctatataccaactttccaacatgttacgcatacacaaaagcatagtgaagtgcaacaatccaagaacaaaggaagtccagcacatagaatccaatacatatgcaaagaaaccagaagattacaggcaaacaagcacaaagacagttcaagtagaatttattcatcaaattcatgtcataagtatactggataagtagcaagccagacagatccatcaagagcggccggcaatgccaacaccaacatagcattggagacaacaaaaggaaatcattaaccataagatgtaagcaaagcaaagcaaaacgcaaatgaaattcgtaaatatgaaccaggaacagataatacaggggaataaaatcagtgagtgggttgggggacacccggagaggttttatacttcgtggtgccacgcacatcccgtaattccacggatatagatcctcgaacttccaagggctcctggatacacgtgaccgtcaccgccaccgcctccggcagtatcgagaatcgacggctcaagaataaccccagaagatcgcgagaaagggcatggcaaaaatcgcaatgaaaaacaaattgctgatcgagcgtcagttaatcagcttgaaaacagaatttgcatcatgaccacaaatttcttcaacagtgagagataggagagagacacaaggaaataaaaacagttggctagaagacaaagcacgggaaaacacaagattcagtctaattggaggccttgtggcgacggaaaggtgaaaagatggccccaaagaaattcacaaagacagtgcgcaggattgctttgagccagctgtcaggtgcaccatttagagaaacagcagtcactgaccggttctgactcgacgagcgagcatcctcatcattattctttggtgtaagcgcattgtcggcatcaggctgagcgtcggatgcatttgcagcgggttcggtaattcctttgctggcctcggcggcaggctgggactcggtggcactttcgactgtcgcgaccgatggttgctgggtagtcgtgggcagttggtctgtagagggttggttgagcttgctaagaagggcttcgcggtcgccagcaagagctgcaagagcgggatcagtttcgagagatatggcagacggttggtatgaagtatagaacggtgttggcttaccgtctgtggactgtgcatctgctgcgggaacctggggctgggtctcagccttcggaacggattccttgtctgcattggtctctgctgcagtctcggattcgtggtgagcaacagcggccacgctggcgccagcaatggcggcagcgacagcagcaccagcaccaagaatctcggtgctgatgccagtatcctcggtggcttcgtcagaggcggacctagcggtctcttcttgcttggcttcgggctcagttggtgccgatgtttcgatatcagaggtggagggctgaatcgactccttcacatcagatgtctcagcgacaatctcgggctcgtctgcataggaaatcgactcagaaatagccacaacatcgacctcatttgcagaaatggtctccacgacaaaagtagactgttctaggacctcagcgttggcatcctcttgtacgggctcttcgacaacctcagcaacaactggcgcttcggctgcagcctcttcagcaacgacggcgggctgctcgatgacaacttcctccagcacagttgtctcgggctcgagctccttagtagattcctccactggagctgcctcgggagtttgctccgcgggagcagcagcttcaacgggctcttcaaccttcacaggctcttcggtaacctgctcctccacgactggtacttcagcaacttcaatagcctggatagtgggctcaacaatgacgggctcagtcacatcctcggccttatcagtagctggtgcctcagtagcagattcttcaacaacgggtgccacctcgggagtctgttcggggacagactcagcagtagactcagctgcggtttcgagaacagcaattggctcatcgatggtcttttcttcgacaacgggagtttcagcaacagcgggctcggcaatgacagcctcggccacggccacggccgcagcagcggcagcaacttcaacagcctctgaaacagtgactggctcatccacgggcttctcttcggcgacagcaggctcagcgttttgagaaacaggctcttcaacagtggcagcggcagcagtctcggtctgctcagagacgactggctcagcaacaccttcaatctcgggttgcttcttctcgaccttctcggcctcgtctgcagtaacatcagcgacggtaggagcctcggtggaagacttgatgggctcctcgacgataagttccttggcggactcaacgggagtctcttcgacaacgagagtctcttccacaacgggagtctcttccacaacgggagtctcttccaccaccggctctggggcagaggtctcagcaacgggctcttcgatggccttgtcagcaacgagctcttcggttgtctgctcggttacttcctcaggcttggtagcttccggctgctcaacggcgacttccttggcagtttcagcggggacagtctcctccactggttcttgcacagactcaataggagtggcgttttcctcaacaatggcggcggcagcctgaggaatagtagcagtagattcctcagtgacatgagcagcggcagcagctgcgggaatggcggcggtttcagtggtctcggaagcagcgacagactcctcagtgagagtagcggcagcagcagcctcagcaatggcggtctcaacaacgggagactcctcaggagtcaattccttagtggtttcaacaacaggctccgccacaactggttcctctgctgcggcctgttcggtggtctccttgacagactcgacctcaataggctcctgagccttctcagcagtggcctcctcggcgacaacggtggcaggctcttcaattgcttcggtggtgggctcagtggtggttgtctccacggcagcaacctcagtgggctcctcgacagcagattccttgacagcatcgacagtctgctcgggaatgggctcagcaatctcggtctccttgattggctcagcagtcgattcctcagtgacaggttgctcaacgggagtctcttcagccacctccttggtaggctcggaaacctcgacagtcggctccacagcagttgcctctgaagcaatttctggaacagcaacggtggtgtcagcactgttctcggcctccacctccacagtcggttcctggacagccttctcggttactggctcctcggcaggcttggactcttccacggctgcttcggtggcgggggcatcctggacggtttcagggacgacaatggtggattcttccaccgcgggggtttcttcgacagcttcgggagcagcatcgacggccttttccgcggcgataggctcagcaacctcctcaaccttggattcttcgactacgggggtctcttgaacggtctcgggggtagcctcgacagttttggattcgtccacggcgggagtttcttcgacgataggctctgccatagtctcaggaatagcctcgacgggcttggattcttccacggcagcttcagcggcgggagtctcctcgacaaccggttcagcaacgctttcggcaacagactcggcgggcttcgactcttctgtggcggattcagcggtgggcttttcttcggtgatagcctctgcgacagtttcaggagcagcctcggtggtcttttcttcagtagtaggctcttccttggtaataggctcagcaacctcctcgaccttggattcctcgactgcgggtgtctcctgggcgatttcaggggcagcctcgacgggcttggattcttccacggcgggagtttcttcgatgacagtttctgcaacagtttcaggggtagcctcgacagccgtttcctcaggaatgggcttctcctcagtgataggttcagcaacctcgacggccttagattcttccacagtgggggtttcggaggcggtctcgacagctttttcttcgctagcaggtgtagcaacctcctcagccttagattcttccacagcaggctcggcgacagtctcagaaatggtctcaacgggctttgattcttccaagacagcttcagcggtgggggtctcctcggcgacagtctcggggacgacttcggcagtcttttcctctgcggtggtttctatgacaggcttcgattcttcaactgcgggcgactcctgggcgatttcaggaataggctcctcggccttggattcttccacagcgggggtttcggaggcggtctcgacagccttttcttcggtggcaggcgtagcaatctcctcagccttggattcttccacagtaggctctgcagcggtttcagaagcggtctcaacgggttttgattcttccaaggcagcttcagcggcgggagtctcctgggcgatttcaggaataagctcctcggccttggattcttccacagcgggggtttcggaggcggtctcgacagccttttcttcagcaggtgtagcaacctcttcggtcttggattcttccacggcgggagtttcttcgacaagctctgcgacagcaacaggagcgtcctcgacagccttttcttccacggcaggcttctcctcggtgatgggctcagcaacctcagcctgggattcttcagcgctaggggtcttttcggtgacagtctcggggacggcctcgatggccttttcttctgtggcgttttcggctgtttctgcggaaggcttcgattcctcaacggcgggcgactcctgtgcaatttcaggaacaacctcctcggtcttggattcctccacggcgggagtttcttcgacggccttttcttcagtggcaggcgtctcgattagatcggcaacctcaaccttgggttcttcgacgggagtctcctgggcgatttcaggaatagcctcctcggccttggattctgaaacagctggagtctcttcgacgataggctctgcgacagcctcggtagtcttttcttccgtggcagcttcagtggtaggctcggaaacttcctcagccttggattcttcgacagcgggcgcctgggcgatttcaggaacagcttccacagtcttcgattcctccatggcgggagtctcttcgacgacaggctctgcgatggtttcaggaatagtgtcgacgggttttgattcttccacggcagtttcagtggcagtctcttccttggcagcttcaggaacggcctcgacagtctctgactcttccttggtaggttcagtgatatcctccaccgccttggattcttccacgacagcttcggcaggctgctcaacggcagcctcagcggaagtggcctcggtagccgtttcctcgatggtaggcttctcgtcggtggtaggctcctcctcgacagtcttgatttctgccgcgggaggctcttcggcgatcggctcggcggcgacttcaggaacggcctcggcagtctttagctcgtccgtgataggctcagcaacctcgggttctacattggtggaagcgacaggcttttcctccaccactggctcggcagcgggcgcagctgccttgggagcttcgactggtgattcctccacgggctcggcagaattttctcgcgtcgaagcagccagggagctaatactctcctgtctcttttgctgcttcttctttgccttcttggccttcttcctttccgcggcggtcaaggggacctcgggttgggttgcatctttggattgtggtgctgtggagtcgagcgaggcagtcgattcgctcagatctgccttggtcgcgctggcagtggatttctcatctgagaaagaaattggttcaactggtgcatctgttggcagcacatggctttccgggatcagtggctcttgcacgctggccatggtttatttcgtttcaaggtcgtaatgtcgtaaaaagatgatggatgggatattaggagattgggggtttttcacaatttgaccagcaaagatttaacgctagatttatcgtgtacagaaaacacaagctcacagagcaaaagggcaatggattattgtgagagtatgggaggaggggaaaaaggcagaaaaaaatctcagcccaaaatgtacaaaaaaaaaaaggcccgtcacggcacagctcacagtggggaaacagttggcatagtgactacatggcgcttttcctctttggtcttttcgtctttcacctctggagcatcgctggagctcgacgtccaatggccgctcgtactttgcgcgctctttcatccggctctccacttccaatatgcggtgaagctggccgaggtttattgtttgaccttctcgctttttgcttcttctggcggtgcaaccgtatgatatacagtcggtggactatcttgatacaacatctgcctcgtttcccctccttctggtggcacagtccaaacgacaaccccgtcaatcgaacccgaattgggcgctaaaaaagcgtcgacccccaattgataaaccggcgccaatggcaggccgcaaggttcttatccacctgtcatatggtccttgagtcattattgcagtgatccccaaaataaaaggacaacatatggtggatgttccattttcaatagtttctccacggattggctgatgtttttttttctctggctcagggcccatatatgcggaacactacggatcgccattctattatttctccgtacgacgcagcgcccaatttcaaggatccggaatctacagatttcgcaaaagctcgtgcctcacactagtagctctcgtgcattgcgtgctgcgtgcgacctccctaagcttgggcctccgaagccgcttttccggctcaaagcacaagcacatagctgcagtaatctgcactggcctgagctttctgcagttcctaggaagactgaacttttgtattccaccgactttcgtctactccgtagttcgtcccagcagatatatatacgcgggtgtggtcggcttcccggtcccgaagcggactccgcaggagaggccaatctaacggagtaaaaatagtatacggaggagttggaccagattgaacccgagtgttggtcttgttctccttttcaaaccccactagtctcctcccgggggggaattatcggctatcgttgcctaggtaaaatcaagtctggttagtggagtatatgcggaggcggaagattaaggggagcttgtatacgatatataaatatgaggttggttttgataccgaatgcttataccaggtgtctccatatcgactaattttaacctattgagcaagttcctcactaatgtctatgcttacactcggaccaacataattagggctttccctcattaggcatttattaggtaagtctagcccaagtgctcagctgcctatttgggaaggtacgatgcggtcagagaacgaaggttaattttcctcttggcataatgtttagacgggacaacgaataattattgtgtataactagcaaagatgtagaagctacctgaccatatgtactagaaaacgatacaaatatcaaggccatcagccacaaatagctacttcctcctcttctcttctttccaaacaccctttcatatcaaacactgcctcgtcttcagggccgaggtatttccctagggtctgtgtataatgttatgattgaaaaagaatcaagactaaaaaatgaaagaagtcatcgcctgagatccaacgggatggatggggatccaagaggcagtgcatcaaagtcaccaacggcggccatccacttctttatactgagcagtgtcatttctcagggaaatgagctttcagccaggctagcgacatcaactgcacaactaacagccatacttcaaccggagccccagtgtccataagaacagacggcccgactatacattgagtttctcgtgcattagtaccatataagcagcagccgctcttgagctagtggatactcaggatcacccgtgctttcgagaccaagaggtctccgcatcgtttgagcatacgcttggcaatcagggactcaagggtatggtcaaactcccacttgtgagacacaagactcgctgaggacaagatgctatcgttctgaaggacgatggaaatagtctctcttatgcatggaatgcggctgtaattgtcgcgggtcgatgagacaacaagtggaaccgaaacccctttaaaccattccatggcggcattgaagatcaacgccgcgggaaccatgctaatgtacgccttagctcatgacccgtagcccacctaggtgggtaggccgtttctggtgcttggtcaacccataaatccggggctggggccccaactttagccaagatcgttagtcaactcttgtcattacggagcagatattagttttgataggccatcttttgtcacagagccagatttgttcttcaccctccgtggtttgcaagatcctcgtgaatattagacgcagtacaggtatttctaaagtcggaaggagccttgccatgtatgagagacttgtccacgagcttatgaattctgacaacgaggagcattggtttctgatggggatatcaatatcaccagagtatcgtggttagatatggccggttgcaatggtgaaggcaagtggccgctcaaattatgttgtttgtatgtactaccagcggaggaatagctgaatatcccggaccggcgaaaatgcaaggatccttactcagcaaaggagctcccggtccgaccaggaggtgttctgacgctaaacccaaactggcaaggctaacccgaaaaggaagccattccatgtttgtggggtagctcaggtacccgcttctctccaccttcgccacaggcacagaactgtcgaccacggagtatataggggcaattcatattctcggggaattcaggaaggctggagagtattataggtcgaatgcgatggggacaaaggggtgatagcacgttccacaagaagtcccacaccgaaggcacataattgacacgcaactaattccaggcagcagagttaatcgaggaataagtgcataagactataatacatgctccagaacatacaacataacatacaacatgtaaatcagagatcagccctatccggggtgggtccaagcggtcagccctacgagaatttgatcgacgctttcctactgatctcccacattttattctctcctattatttctctccagagtgactgtcaactcccacatctgacgtgagaatgacctactatcaagacctgctgtgattggtcagagtcaattgttttggtcaatcaacactaaaagcacgacatcgcgtaccgaagtatatgagccatcagccctatggttcgggccttatggacgcaatatggctatcattactagccattccccttttcttctttcttcttcaactcctcttctctatagcaatctggcgagccgctggttgtgaccctctagactacaaagagccggaaaagacccgacgcaacaatggcggagactatctcgactcgagtcggtcacgctttcgcaaagcttttacgtattgatttgagtccaattccctcggtcgtcggagatgacaccaggacttatggctattacgagtgtgagcctacggtgggcgactggtttcgaggtcatacacctaccgctcctcaagttcgtcgctacgtttggggcctctttcctttcctccattggatcgggtattacaacgtgcaatggctgattggggatctcgtggcaggtgagaaactccatttgaatagtcaaatacagatactaatctgcagctcttgacaggcattactgttggcgccgtggtcattccacagggtatggcatacgctgagctagccaagctgcccccagagtacggtctctattcttcgttcatgggggtcttgatctattggttcttcgcaacgtccaaggacatcactattggggtaggatcagtccgttctttcctgggaaacaaacacctaacactctcagcccgtggcggtcatgtctacgctcatgggttcaatcatcatcagggttcaagcagttcaccccgaaatatctccaccggtccttgcttccgctctggccatcatttgcggtgcgatcgtgttattcctcggattgctgcgtcttggcttcatcgtcgacttcattccccttcctgctatcaccgctttcatgactgggtccgccatcaatgtttgtgcaggtcaagtgaagacagtcctcggggagaaagcgcatttctctacgcgtggggcaacctataagatcatcattgatacgctgaagcatctcccatccgctcggatggacgctgctatgggtctcacagcgttggcaatgttatatggtatacggtctgcgtgcaactacggaacgaggaagcagccccacaaggccaaactgttcttctttctgtcgacattgcgcactgcctttgtcgttctcttctacaccatgatcagcgctgcggtcaatctccatcgacgcgaccatcctgccttcaagctactcggtaatgtcccccgcggattcaaggctgcaggagttcccaaaatagatattccaattatcaaggcatttcttggtgagctccctgcggctgtgattgttctgctgattgagcatattgctatctcgaaatcattcggtcgtgtcaacaactataccattgacccatcgcaggagtttattgcaattggcatatcgaacctactcggtccgttcttgggtgcatacccagctacaggttcattctcccgaactgctatcaaagcaaagtgcggcgtacgaactcccctcgcgggtgtgatcactgccgttgtcgtccttcttgccatttatgcgctgcctgccttgttcttcttcattcccaaatcgtccttgtcggccgtgatcatccacgcagtaggagatctcgttacaccgccgcgtatcacctatcaattctgacgtgtatctccaattgacgcactcatcttcttcatgggcgttatcgtgatcatattctcaaccatcgagaccggaatttactgcacaatcgccgtctcactagcagtactccttttccgacttgccaaagcccggggtcaattcctgggatacattcaggtccattcagtcgtgggtgaccatatcctcaacgcatcccagggggacccaaacacagaattcgaagatgataccgaaggatctcgaagaatctacctcccaaccgagcatgacggtggcacaaacccccgaatcaagatccaccagccagccccaggaatcttcatctacagagtctccgaaggattcaactaccccaatgcaaaccactacacagaccacctagtcagccacatcttcaaagcgacccggcgcacaaacccacaagcatgggaaacaacaggcgacagaccctggaacgaccctggtccaacccgcgccgaacgcaaacttcttctgtcggaggaagcacccacttccccactcccaactctgcgcgctataattctcgatttcgccgccgtcaacaacgtagacgtcacatccgtgcagaacctcatcgacgtccgcaaccagcttgaccgttgggcatccccagacagcgtgcagtggcactttgcgaacatccacaacaaatggacgaagcgtgctctcgcagccgccggcttcgggttccccaccgtctcagatgggacaggtcctcgatgccagaggtcgatctttaatgttgcggagatattggatggcggactacctgcgttagtaactcagtctcaagtcggcgggttggaggaatggtcaaaggacttggaagttggcctgaatgtgcaggagagcagtgcctcgtcggtgatgggtgtcactgaggataatatccaggttgtgcagactggtgagagtacgaaggttaatacccatcgtcgtcgcggtcgatctggtgtcggtacttgtatggcggccgttgatggaatcaaccggcctttcttccatgtggacctgactagtgctctgaagagttctatggctgattcttaggatgcagatgctggcttgctttccgtttaatacttgctcgctttctttgactggctttagcccttattagggagaacttcaatctaatgaataagcctatatagctcttgaatttatcaattcaacatggattatttcaagctgcaatttgactaggcatccaacaactttttatatacctgttatctacgctacagtcagtttattcaccggaactctgctgggaaatccctctgagttgtagagctcaagactgacggtgtcggatctcgatcgcgcagatcgaaaactagtcctaatggcgtatagctagtggattccgatgatcttatctgtggctgaagaacggtcatgtgcacagctccaaagcacgaattactacctacaacctactccgtagactgactcagagtgtgtaactatatcatatagaatgcttaagaggatagatcgttcgcaacctgaaataatgcatctccgccatccatagcattgccaattaacaatgccgaggcaaacatgtacgttgtacacgcgaccaatgttttcaatcccggaaagatgaaacacacaaccaatgatttccagtatacgcgctggttcatattccctttccgggatgagactgacgcatctcacggcattgactcggaataccctcggtatccgatgcatccgtatccgtcgagcaggagcagctagctcccaacaaaatcaatctacagctacaggaagcatttcgcttcgcgccggaatccccactgcccggtaccggatctggccggtctggtacaacataccagcatgtacatatatccgcagcttgaagataggggacaggaacgtgggtctgtgacggaacgcgtcgaaggctacgatatacgcaatgaccggtctacatatgttgtgggcaagacaccagggccgtctgtggcgggggcggtgaatattgacgtgtgtttcgctgacagcgcgagcgcgagcctgagatggctgttgttacggcctggatcgtgcctgaaacgtgtttcgtactcggtgtggttgctgggatcagaccgcgttgatcgagggacgtgtgcaggccagacagtcggtgcgagagtcgatgttttcgggcagatccgggagggcgtggaaagtgagcgcggtagattgtcgttcctgggatcataagccgcggctcatggtttcgttctcgaggctcgcgttgggttatgggaatatatttggtgatttgggtatgtagtagtactgcgcgggctttgaatccgtgggggcggataactatatcgacggaagaataatggcttatgcgctgtccagcgcatcagctgcgagtagcgagtagcgctggcgctagggccgtcggtgcatgtgtttctttttcagccgagggcgtgagtgcggttgtgcggttcaagggaaggaagagttgactacgagttctaaccaccggggggcacatttgctcttatgttagaatagagagagtggatatagtttgagaaagagactaagctatggatactgtgtgtgtcttatgccattacggcaatactgcgtacacgagtgtacaggcgctgaggctatacaatatacgatgccaagtggcctctcgcatgacctcacgggcaggtcaatgatgagttgatgagtcgccgagttgagtattaccgtaccgtattggtatttacccgattacacccggacggggccgtcttcacttatacaacagttctgttcttattctttttcttcttcttctttactcaattgctgtagtcaattgcaattgcaataactgtaactattattattcccaattcctatgttgtatgttatatgtatatcaaccgcgttgatagctagaacacgtaactgcaccctgaatcgagcttgtgtgggtccgccaagctgcgaccaaccgaagttcccaaaaatcgaatttccgggagaaacgcgaagagcctctggttagcccgtttgggatgcttgaattcggtgcagatgcgacgggggtaggtcggtctatataagggtctcgcaccccgttcaaatggctgaatggccgtttaccgttactgcaaaggttctgtaatcttctttagggcaatccggaaagaccagatttcactgcgatagccggattacggcgggtcgtaaatccagaagtggagctgcgaaagcaaggacacgacaaccgggttttggttatgttttggtttttttggttttcgtttccttgcttatggcgtttccaatcttctgcctcgtccccccccctgctatatatctacttaagaatccaactcctgcaggtccgatgcatggcttttacctccctcggcaagcctggggaggataccgaagctgttcggagtaccggatccgtacagaattacgtattttccaaatatgaccactcggtgaggtggattcccgagggacgaagggggagacgatatccacctcatccacattatttggctcctttcagccggtggttgcccagtgactccgtagttggtggacctggaatccgagtcgggccggtttgggtgacgccgggaacaaatccaagagagatagtgggcccgagaggattatgattggagaagaggagcttggaggtggatcgacccaccagattggaacatgcttaagatccaccgcaagggttggattattgtgattttgattttacgattttattattttataattacaacttgtatttccattttcttctcatgttatccctttgtgcaattcgattctacaattggtatccgtacaccgtactccctaggtccaatatattccatgtacatgctaggtataccgctaaaccttgaaaccccatgcaggggatatagataactcagacccatacccttcgacgaatcacacccagtggacccagttggaacaatacccgactgatcccgacaggtcgcaatacgcggtaagaatgcccattacacacccatacgcacccccagcattcctcacggtgtattctgcgtatcagtccacgcacaacttagggcttttttcttaccttacacagacactaagaccgactaggaggcggacgggcgaaaatttggccgtagagtatttatgtcctagtgagtgccgtctcccgtagtttcccagctttttctccctgaaaagtccatctctctcctctttctttctttctcctctcttccacccaccctataattctataaacccatccatcgcaatggccacctctcgtgtcttcgcctcccgcatggcctcggtcatggcccagacctccaaggtcgcccgccctgctgcccgcttccagctcaacgctgccaccaagcgcaccttcacccagaaggcccccgccttcggtgcccccaagcgcatccagtcgcccactctcctccaggccaaggctttccagactgccgcccgccgccagtactcctccgaggtcgcctccgccatggttgaggtctccaagaacatcggtatgggttccgccgccatcggtctcggtggtgccggtatcggtatcggtctcgtcttcgccgctctcctcatgagtgtctcccgcaaccctgccctccgtggccagctcttctcctacgccattctcggctttgccttcgtcgaggccatgggtctcttcgatctcatggttgccatgatgtgcaagtacgtctaaattatctacgactcgggttttcggattcttggaaaaatgtcatcaaaacaaggattttgggttttttgagagaatctctttttctgccggggagggtatttggtcgtgatgtattaccatgtactactttcagcgtcatctacaacacttttctttctgtacatatagagtcctatatggcccatcgaccatccaacctatcaaagagccaaacgaaaaactctgtgtgttgcgtctgacggccgtataatattctctttccttttcctagttcttccccatggggtgagattgtatgtataacgcctgaatgagttactttgctcccaagctcagaactccacgtagacaagctaaaagctataaacccggggcgatcctagctcgatcttgacaacaaacagctggtctttttggcgcttgttatatcccgctctagccgatgttgctacgggtcctgcagcattcgacccgctcttcaacttgcaactacgccagaactaccacccattggcctacaataaacggcgagagtgaactacagagccttcacaatgtgatcgagctatttgatcccaaagaatcagtcctggcggttcttaatgagcctgagaccctcgacgcaagattcttagctccgggacctcgggaacggctttcccgtagtcagctgactcaacctgtgaccgtgacatcagcctcggattccagggctacagatcgaggttctgcatgcagcatgcagattgaaggtgaagcaagtcatatttcattgcgaactaggtgttttgtgaattcgctattttggggttggggtaaagctctgatgctcggcaacttccccgtttatatctacgaacccggtctagtccgctttcagttagtgacaatatcaagtatatcttggtgatattaatgagatctcatggatacttctttttgtggattatatgtttataccttggggggttttgtaatttggtaaaggtccaactgagcaatatatatactgtctctaggcttggtttttgaggttcaatatatacattggcgactaccaaatcacatcaatcttgaattatttttctgttattcttatttttcttctgtttaatttgggaaatacaagaatagaaatcacagtaatcaaaagagacttagactctaatcatcattgaggcgagaagagcaatacacgcgttaatacacccagccgacatgctcacactcctgctggaagaaaaagctcaagtgcatcaataaatatacttcatatgaataagataagaccaatgttaacagaagacctgcaagaacgatcacgaaagactccaaacatgccataatcgctcgataaaccgataaaaccaaaacgctgatggggaatatgtatcaccaggactcgaaaagaaagccccaaaccccaagtgtaagcgcatcaaagcaagccaaaaaccaagaagagagcaagacacaccagctagaaaatttccagatcctcaaactcaaccaccaacccatccgccgaacccgttgccaaagaagcatgcatatcatcccacatcgcaccagcccgcgacagacccgtcggccgactcgcataaaccccaacatgaacaaacttatcttccaccccataaaagaaccacgtcacctcgcgcagcttcttccacgtattccccaccgcaccgggcgacagcgcgaacggcgacgccgacggaacctggtaccaaatccacagcgcgtggccgacacgctcgagcttgatacgcagcgagtggatagccagtccggcctgagccgactgcgccagcggcgacaaacaccagtccgcgccatcggccgtcgcgctcaccgacgacgcgttcaccgttcccgacgagaactccattccggctttgacccatttgcagggtgagcgcggtgcgttgcggaagccccgcggtccgtcgacttcggaggagaaggattgcggcgcggcgccggcgaatattaccagtccgccttggtcccattccagttcccagtctgcgctcacggtcacctctgctacgacgaaggcgtggcggagggatgtgaagacgattggggcggtggaggtttcgccgttgggtggtttgcgccagaggtctgtgtttggacctgcgcggagggtgaagtattccatgcactggggtagttcgaatgtcggtggcaggtttagtgccgtgaaggttgaaccatctggaggcatttttgattttgagattttgggatttcttgaattgggtctccaccgttcttaataggtgggaaaaaggaaaatagttgtagagtcacactgtgtggtgcctcgagaataggaataccccggatgagctgcagttgatcactcttaaatccttcagcgatgacgctggggtcacaacatttgcctctaaagtttaagcaggcgcactaatccgagcaaagcaaatcatgcacgatgcatacgcatagaaggcagaaaaaaaaatcttgggatatgatgcagtcgagaattgagatacgccgaatgcgggttgcgccagacctggaaatgggaacaccgaaaaaaagcaaaaggaaagtaaagagaatgagaaaaagagaaaaagaaggtgattgaatcaattattatggcttgaactacgcagtacttatatagcgagaccaaatgtcggcttccccctaatggaattcaggggatgatctgctcatgtccggccggggatggccgtatcaaggaagccagaaccagagtgctggggactgaaccaagctgttgggctccctgccgcgctagagtcatgttctttatggtcgatttctttgaggccctcgagaagcgtgcttgcatagcttcggcgacagatggcctgcgggccagttcgcaagtggcgggtcaccatgcatctggggatccatcacgatgtgacggggcttctaagaggagcatgaaaggtcctttaggcccaaaggacacaaggggcatacagaacaaggaatagggcgaatgtgtgccgtggacagctgtccgggctgaaaatgaaagaacatgcagtcgagaaatattttcatcatccatactggagaaattatacttcaacatatcgaggatcgatcggaacaatgcaggacgcatgaactgggtggaactcagattcgggggagctgagaattgtctagggatcttccctggtcggtggtttgacagcttacaggaagggcaaaaaggcttctgtttttattttatcccgactgcggttttcgctctccaattaggtgttctgcacgaggctgaagagggtaatcttggatgtttcatggggatcctggaccagatgtacaacattctaagatgtaagtgtaagtgagatgtaagtataggatagaagaaggaacctctgctaaattgtccacttcttctatatctcttgtacggagtatgaagatgaagtaaaatctaatcagctaacctgtttctttttatagaaggccttggcttgtgattgtttcttttccttcgtactttcgccttaacggtgtgtgttggcatcttcgggcgcaacttcactattcttacgcctttctcgcctttctcgcttaacaccaaatacgtctcatccctttctcccttgaattccaactcaaagaatacgccccgcgctagcatgcgaatatgcacggggcgaagtgcaggtcccaaaaagggggccaacccccgagaagcgaagccaactcgtattttggcctggagctcgccctcccaagactaactcagggctttggaccaatcaaagcagccccattgacatcttggcttcgtatttgaagacccttggcctcaatccgagcaactgcactcgtgcggaggatttgcttgagccccctgatccatttatttaaatgccatccatttcgtaaaatctggggaaattgttagatcttagatttccccagagctaagcagaacaaaacaaattgcaaaaatggcgcctcgacgcggcagcggaagctattccagctatgtcgacgataatccgtggagcgacacgacctggctgtcactggagcattactacccggacgaatacaagcctctctttatcacccaatttgtctttgatatcatttccctcctcgcgttcgtcgccttcctcatttgggcatgcagaatcagaaatcgtagtctcccgctgaaagcactcatttgcgctctgatttcctctatatggtatgtggaaagatctggactaaataaacaatccgctaaccagtgggtcacagctgccaaataaacatcatcgcctgggaagccctatatgtggctgaggcgcaggtgacgatgtactatttgatcagcttgatgctctgggacttattcaaagtcgttgcgatctgcctcaccttctatgtcttctggaacctcatccatcgcctcctgggatttattagagtctccggcaagccacacgcggcagtgaccaccatccattatctcctcctcggtattattttcgtggcctctcttgccgaatggggcatgtgtgttgcttcttacgtgcgaagcgtggtttccactctcaacgccgatatgcagtggtcctggacacagctgaatgtcgcggtgtatatcatctattggctgctgtcattggagattctcgcctggggaatcttcctggcgatcaaggctcgcagctatgctttctggtcaaaggtgaatctcactccaatagtttctatggtatacaccaactaattggctatcagtcgcccgctatggcactcgtcgccgctgccatctcctggtgcgctgtgtgttccaccctggccatcatttacattcgctatagcctgatgcctacctctgcatatgactggccgatatacctggacgccgccagaactattgtacagttcgtgctctgggtcggcacttacactggtcttctcctgtgttgtgcgaaatggcacaacctcgaccaggggccgaagtatcccgcacctgattatcagtctcagttccccgagggacactaccctcagattcaacagccatatgatattcctccgtacgtggatcattcaacacagcaccaggcccacccgcaccatgtctcgacctagtaaggttcatgttaaggtctgattctgctgaggtctactgattgatttcctatgattttgactttgtgagagtttctattacagtgatacttcttttaatgtgtataccgaccgtttaatgttgatacccaatacgatgcgaatgatagcaatgcaatcctttttgaacaaaacattgtatgaagcatatttccagtatgcctcaaataacaccctagaacctagaaaaacacaataaaccaaaaaagccactcataaaacatgaagaagcaagtagacaaaaacgtcttggcagaccaggcggtggcgcaaacccgcgacaacatcatcttcattttcgccatcaagccttcgctcgatcaacacccactttcacatctcacaaaatggtctgctcaaaatgccagaagaagctcaaagccactgagctcgccacccccggcgtcaagcgcaagaacgacatgtactacggctcgccgtctagtacactcggtggcggcgcagacaagggaaaggcgaagccgacactaggcgccacgggaatcggaaaggtatgttacagaattttctgtttgatactttgaattaaggagaattatcactattctggataagttgtatactgacattccctccagagcaagctcctcagcgcgaaagcgaagaatccttatgcggcttatgcttcgtcttgtgataactgcaaggtgaagacggagatagggaggaagttttgccagcggtgcgcttatcagaggaatggtatgttgctgtattatttgccctttgttcgttgcatatgctgatatcgatactagcctgtgccatgtgcggcaagaatctggcggggaagtcggtcaaggaccagcctattgtccagggacagaagttcaacatggcatgaagtgcttgtgggttagatctgggcgattacagccttttattttctgttttacattgcatggcgttgggcgttgacgataccgcggaatattagataaacatcgatattgaactgaaatgaacttgatttgacagtgtaggaaaattctagttatacatggcatgcgcaataagagtatatgcaatgcgacaccaatggtgcgctataagatcggaacaagtatgccttttcatctcctgaagaacattgaacctcgcgttctccttcccagctcccttcatctgcttccatcacctcttaacggtcggccagcatgttcttgatgttactgtagtattgcgtgttcaagtattgcgggagctcctccttggcgagccacttgaagtccttgaggccctgggtgttgacggacagatcggcctggccggccatcatacgagacttcaaaaagaagatcttgctgccgggaacctcgatcttgttgcctgccttcttggagtggcgggggttgaaggagtgccatccgaccgggtggaaaccgaccatccaggtgttcatgttgacaccggcggactgggcgagggtgcgttcagcagcctagagtaaaatagtattagtatgattcctaaactcaatgcggttcaaaagtatagcactcaccaagcgaagggtctcgcccgactctaccggcgagctggggaacttccagtgtccctccttggactgaacaaggagataaagagtacgggaaagcaaacgatcgagactcttttggtcgttcttcttgtctgcctccgtgatccgaggatacggccgaggaatttcttcctttttgctggtatcttgggaagtcgcattggcagtggattctgcgtcctggacaagagcctcaatctggtgttcaggctcagactcctgtgctcctagcaggagctcgtcgttccatgcatcgctgtcgtacgcgttgtaatgtccgatatcacgcgcggcagtccggcgctcctggatcttcttcttccagtcttcgtcggccggtgttccgcgtttgaagtagaaatatttcgtaaagggaagggcgagacgctcattcagtcgtttctggtagaaaaagaacgctttctcgaacggttcgagttcacgggtgatttggggagggcgggagaggactacaccagcgttgatgatgtaggctggcttcacggcggagtcggccgctgttgatgcggaggtcgattcgattgctggtgctgccgaggaatagctgcggcggctaatggtctcttgacagcttctgcacacgccggagtcgactattgatggccctgcgcgcggagtcagtatcaggaatccgggcaaaaagttcaattggacatacgcaatagcgaggccacgcgccgtgcaccattagatcctgacgacatcttcaagagtggaatggcaatgtgtttggggctgatcggtgtcttgtctccccgagaaaaagatccaaccaggtcacgttgtcgccaggcccgattgggattagtcaccgcccgggcgctttaaatttcaaaattcgacttccactttcttcccttctccaagcatctcttatcatcactgcgtccagttctctacggccggttgatcatttaaaggtgctcagagtgagctcctcctgagatcgcggccaattttcgctagcggtaccttcttaaaaaatcaaggcgtactgttagatagctgccgcgaacatccccttagtcttacggctgtgtgctttgatagaaatccatttttaccattttaccttcattcttttctaatttctcctccgcaagtatttccagaaccaacacctaaacctcccctcaaatctccaccagcagctcttcctgttttggcacctctcttcctagttgcaccatcctctcctgtgtaccgaacacccgcagtatgttgccgtaggtatcccagaaggcatctccaaggcgcgggagtaatttgccctgatcgaccagacgagcgatacgcccggaaccagtgtcggctagggatgtaccagcctgagcgatctgggctgcttgaatcaatgggattgtctcggtgtcaacatcaaagaagttgttgaattccttcttggtaacagcctggttgttgctaggctgtgccatgataccggcaaccaaactgggtgctgtggtcgttggccggcgtttgatgcgttgtatattgcctgccagtttgatgaaggccatggcggcaagcatgctatcgtatcctgcctcatgggtactcttacggaacttgtacttcgcaaagcgagggtcgatctctgcaaaatgattagctgtgctcgcttgctgtcaatgatataactcatgtcctacctatcttggggctttctattccagctaaagtcgtgttgagatcttcaagcgaagacatagggtttagagagccgcagtcgtgagtggccatgtacttggtatccgctagcacggggaatagctcgtggatggcggtctggaactcggcgagggtattcggcaacggacctaagaagcatgcgtggaagaagagcagatcgcagaacatgttgtggccgactagaatcggtctgttctctttgagccgactcttcactttgtctgacaactgctggattccgaaagtcggctgctcgatgaccttcatcagaggatggaaagcgtctgcttcaagttcgtccaggcttccactcacaagcgcttctgcgatccagcggaacccgatatgcttccggattcgttcctttttgaccttcaatttcgcctccaaggtagactgctcattgcatgggtcccgcaattcgatctggacgaacgttgatgcaccccgcgacgttaagttggggtattcgtcgctgataaggtggtgtatcagccatttctgcatgctagtcaacccggtaggtatgggtcctggaacaagctggatgctgctgggtggcggaatgttgagccactcgcggcgtttctatatatgtcaattgatgtattcaaatcaacgtttgatacaacatcttacctcgccctgtgccagccactcattgacactgacccgaacggcctcaaggaactccagagattcatgatcgtctttcttaatatccacaacttggacagggttccgttggcatttctctgcagctcttctgattgccaattgttcttcctctcgagataggtatcgaacaccgaaggtgcacatgtggtcaatgctgaagtggttagcaagcaagaattccattgctgttcagggagatattagcgtatgctcaacatattgtagatatcggacatacagcggcttccgaatgtccagtcccgattcaaatccatctcacgctgggtgattggactcagatttatgttgtacggtttcagggtgtaggtggctatagatggttagcgggacacgtcttgcactagggttaatccgtacctttttccttatcttcatgacaagttgtcagcccaacttgaagaatctgataccgctctgcagccaatttggcttccacatatcgttcctgcacagtctggggccgggactgtggtgtactggatttgaaagccaccccagacagctcgaagtctacggacacgaagcagctggtggagatgtcgttcagtatggaggataggcaatcgggaaaggtgacagccgtgatatccatcttggttcaaagttgggaacagcaccgaagtatgagcgtagtgaatgaagataagaggtgaaaaggaaagagttggctttgttgaagtactgattgctagacaaaagaagagtatgcattaggaaggcaggtatccgcgtttaattgatcacaaagagcactgcgttgcgtgtagtttgtagaaagggtgatactttgtcgacagtcgacaggatgatatagcttgaaagtttactggtctacgctgttgagtctgatagaccagagttgtgataggagcaaagaagaagagagagatagatgaggaaatagtgatataatatgtataaaaatttgaagcatttaccagattctggttctctatagatagcaaggattgaatatgcatctttttgtcaagaaatccttcgcaggttctcaaagtacattctctattgcttcagaaatacagcatatagcttcacaagcaatatctatcttaaccctaggagttagctcagttggagtgtataaatgaccgaggcaacatcctggcgatgtttatgtccaattggaatagcacaggctgttacctgcgatgcaataaccgaaaaattgggaaaattggcctagagtaatatagaagtgaagcgcctctttttgaacctgtctagggagctaaaataatcgtgaattgagaagtgagagagtaaacaagcctacctgaggctacatagacgatctcacaggccagtcccgtgactgaccccggacttggacgagccgagggaaaacgagagagccgatcacagacccgacacgctttacttccaagcttgaagtttttccctttataattactgcttatacaactttttgaagatcgaatttgacctattacatctcggcctccccaatggcgaacggaccctctgcgtcgtcgcgctctcacgccccatcctcagcttcccccacaaagttgtgctccaagacatacaagaaagcctcccaactgtatctcacacgacgcttaccagaagcgctcgcaaatatccaaccgattatcacgccttcagtaccagaggaccagcaaacaaatggcgacagctcaacacctattgcgccgattgccacggccgctggcacgtggaggatcaaggtgtggaacctctacatcaccctccttagcgcaatagtcgatctcggtgcagaggagggaaagaagcaatttggtcagaaggagtggaaatcaattgcgtcgcaagtcagagaaggtgcgatttgggaaactgtggtcgaggtcggataccaaggccacgagggttcggtggatcccgaagtggtctacaacctgttagtatcagctcactttcctgcctaaatcgaggtactgacaacgcgatcctagtgctaccctccttctaacccactcctcttcgcaatccctgaaccaacagcgccttgagacctatctctcttcctacggacaacccaacctcgacctcgcaggtcgcctacacgatgcttctgatgattacgagcagcgccctattcgtgcgacaagcggagctgatactccgaaagatctaaatgccagagtaaagattatcgagctctttaccttgcacgtcctcccccgcaatgacgagtgggaatactccaccgaatttatcaatttgagcgaagtcctcgatgaagaacgcaaagaactcttcctccagacactcgagggcctgaaggaagagaaggagcggggtgaaatgcgcgcagtcgaactacagcgagccaaagatgtagagcttgaacggaaacgagaggatgaacgtcgtgaagccgaagaagcagcagcagccgctgcgcgagtacagtctagtggaaataagcgcaataccagcgaagtcgactatgggatcgagaaaaaccgcacaaatggttctcccaaaggcaaaggagccaggcaaccgacagacaagtcgccaaatggcaagtcacgagctcccgtctcatcatccagctccaaaaatgtcaaaaagcaggacaaggctgaaccccggggtcgcccaactcaggccgtggccactggcgtgcgcaacatcttccgtcacattatccgaactgtgtctgggaatcccatgtcaatagtgcgcatcctacttttcttgatcggaattacgatggcgatgagcaggcagggtgtgcgcgatcgcatccgacggattacagacggcgcttggcaaaaggtcaaagctacagccggaatgggagtcaaagtgagctatatctgagatataagccacttcgatctctacgcacattgcatggttattctgtacatttttcttgatcaagttggctctccatcattcttggaggttatttttgcataatgtttcttttgtgattccctttgtgattctctatgtccatgtattctacacatgcataccaccgggtgtggttgaatttacttataagtccgatttcggtttgttttggccagctattttcaaaggtaatcctcgtaaagtgcctaggctcattgtccagtacgtggcccatcaagacagtaagagatcgctgagctttgaatgttgttatgtaacctagctattctgaataggagacttgaacaatcactggaacatccaaagcctcgatgacatcgaagaaaaacaatccaagactcctcaccgtcggaggaatgaaaacaatattatattctaaacgggtatcaaatagtcgtacgctcatgaacacgtcctgcgtgatccccacataaattttcagccataccaatctcaacatcatcgcgcgtagtgtcatccaaatcctctttctcgatgactctagcatgccaccaccggaacatctgaacgaagaaatgcgccacgcagatctgctccgtggtatagagtagtaccggcaccgatgtcttcgcttttatgaagagatcaactggctgccacattgcgtagagcaacgggataccaagtgcggtgctcttcgctggtccgcaaaagcaaactgcaatagtttcctccggagacatgcgctcgaatatgggcttggaccagcgtcgagagctgaagattcgcggtggtctggagcagaagaagcatactgccgttaaagtgatgtaaagtaggatgttgaataggaccacgaagattatgctctgcgcggaaaaggtttggagagctcctgttgcgaagcaggaggagaatgtggccctgatatttaagaatgcgggttagaaagaccaaaaaagagggccaaggctttcgtatagaaagctcgttgtactcaccagatcaacaacaataagcagacagtagacaacttaggcagcttggtcttctgcatgacatacgcagtgcgatcaggccaagtccacctcaccacctgcccaacgaacagtggcagtaacacactgagtcccaattgcttgaaaacctccctatacatacttcccaaattcccacccccataccgccagggatcaaactccgccctcttaggtatcaacgcaacagtccaagcagccgtaacaaacgggccgagaatattagccaacaagacctccaccaaagcagccgcatcatctccaccggcagacctcgtcataacaacattggacgcaatcgtcgtcggaatacaagcagtgaagatataccccgccagcaccgcgcgatcaattttactccccgtatcggcagcgatgataatatgcacgatagccagcaccagcgcaggaataaacagaaacgaaaccgcctgcacgatcaagtggagtcgccaattcagcacgtgctcgataagcttctggcgcgggatgctcaatcctgagattaggaagattatcgcgatcacgccgtacatgatgctgtattcggagcggatgatgcctccatgcttggccacgtttgggaagcagtatgccagggcgcacacgacgccgatcccgattaggagccattggcggaggattagacttgcgatgcgcttcagggcttgctgccaccgtggctgtgcgatgtccggggctgcttccattttctttttagtctaggaatgatggcatgggtattgtaccgccgtggatggattttggggtatgtaggggatatgtagggggaaattttcgtgatcggggtaagtccgacccatcggattcgatagcgcgcacaggaatcgcatcatctgaagctatatgttgtactattacaatgtacatggtggtatccatcatggataagtgtatattttgcatctttgtatgttgtatatcaaatctgggaatccaaaacgggttgccgaagtcgggtagccgatgtcatcaatcgggtcgaatggcaccggagacatattcgtaatctgagtcaacatacggaggaactagatcatgctgacactgtcagtttcatatcttgtataattcgttatttggtctgtccgaggtaactagatctcttgtactccatacaacaaagtccgaacaaacgccgtgcaaatgccactataaattcgggaaaacgttcatccgatcaaaatgacgctactatcaacgtcactgccgcaacaccttgcccatatatacattccaacaactgaacccctgactataaacacaaagttcaagcctgcagcaagccccacgttcaacgaaccttggaatactttaattatctgactcagaacgtcccatgaccctttctggggatggacctcggctgaggggagatctcgcgctggtccgagatcacccgccagcggagttcgatacttcgctccgaattgtaagtcccgaaatattcagaatatccccggagtaatgagctccctggagaaattaggcttttctggactgttgtactccgtagtctacgggtagattgtgtataagatgatattatacattgtaactagtcgaacaaggcacgggcgttttctgtactttctctccccctacattgtacgatgtaatctgaatctcaaggtaccgagtataatcacaagccgtcaacgtgataacttggacaagacatgtgaaatctgatcattaaaaatctggggtcattcattccgctgagaagagagccgcccttgttgccgaaggcctcgggattgtcgtgaagcgccctacattttgtgctcggtaccaaataggacataattattatacatatagagatctcccctcggcaagtcctggatctgtcacctcttttttttccctttctttcttctctggtcttctcatctgtgcgtggtcatacttccgttcgtccagcttcctccgcttccccgtcatagctccccacaaagtttggcaccgttgccactcgccttgaatcatataccctggaacttcgccttttctttcctgaaagattaaagatccttgcaattgatatcttgatctttctttcagatataccatctcttccaattgttcggcttatctccggaacggtatacttccgcacttctccacattctcggctttttctcgcgacaatcggaacatctgcgaaacttgattaccgacattgaaggattcctgtgaaatctttgtgaacaaaagtgcaatttctctacagttatactaaaacatatcgaaacaatgtctgccaaaaatgtcaatcagcagaagcgcacatcgcctgcggtcaacttgatcggtatgtagcatagactcactccccctttcggggtcgtgtacggttattgacctatgcccgattagctggtggtggtgccggtatgatggaggctctcgtgtgccatcctctagacacaatcaaggtccgcatgcagctgtcaaggagggccacagcacctggggtgagttacggaatttgccattcgacaatcaaaagccattgctaaccattttcgctggatcaggttaagccacgcgggttcgtggccaccggtgttcaaattgtgcaaaaggagaccgctatgggtctgtacaagggtcttggtgccgtgctgggtggtatcatcccgaagatggcgatccgattcacctcatacgaatcatataagggcatgctcgccaataaggagacaggcgccgtgagcagcaaagccactttccttggtatgcgaagcgttgaaaaaaatcgaaaatgcataatggaaagctaacaatccctcatagctggtcttgccgccggtgttaccgaagccgtggccgttgtcaaccctatggaagttatcaaaattcgtctgcaggcccagcaccacagtttggccgatcccctggacgcccccaagtaccgcagcgccccccacgcgctcttcaccgttgtcaaggaagaaggcttcagcgtcctctaccgcggtgtctccctgaccgccctccgacaaggaaccaaccaggccgccaacttcaccgcatacacggaactgaaggctgctctgcagcgctggcaacccgcctacagcgacagccagttgcccgcttaccaaaccaccatgattggtctgatctccggtgccgtcggacccttctccaacgctcccatcgacaccatcaagacccgtctccagaagacccgtgctgagcccggtcagtccgctgtctcccgtatcatggtcatcgccaaggatatgtggaagactgagggttaccgcgctttctacaagggtatcacccctcgtgtcatgcgtgttgctcccggccaggctgttactttcaccgtctatgagtacctcaagggtaagctcgagggctctaactggtctttcgttggtggtagctttgatgagtaaatgtgccaaaatgtcttgttgttttctggaaagcattgtgatacctgacttggcatggtgggagttgcattccctgtttcgcgcattggactctggaacagaactgttcattgcaagccgcttgaaacggctctttgtgtaaatattttgtgctttgcgttagttcttttctataccactttggtgcgccttgagctgaaatagagaatatccaaaaccattgaagagtcgtttgccagtgtagtaatttggtgttgagggtctgtccatgaatgacccggttgtagatacaccagtcagcaatgcttgtgtaacaaccacacaagaacatattcctatcgagttaaaataacacaagttttttctcctttctgtattatagactcgttggatgtcgaaataaagcccaactgggcagccctgacggctgacaacgcgctatcggcccctcattattcaccgcttctcccctcataaataacaaccaaccaaccgagctgcatcctacagtgcagcatcatgcagtcaggaattacaggtgagacattcgaattatttgatcttgaactctgaaaaacccccattgaattcaacactaacaaacatctagtctccgcggagctgaaagatgcattcgcccgcttcaactccgacccctcaacattctgtctgcctgcaactattacagcagagaccctaacgccgctggccccaatctccttccaaggaagcccatcggaaaatgccttcttttcagccctcccccagctgtcctccgtcctccagcctaagacccccatctacctccttctccggcgcccatcgaccgccgcctctaccgctccactcatcgctttgacctatatcccgtataatgcacccgtgcgagcaaagacgctctttgcttctactcgctcgacgctgacccgcgagttgggcacggagaagtttgcttctaccgtctttgctaccgaggaagacgagattctgggccaggatgcgtggcgcgagcgtgatggcgagggccccaatgctatctctcgtgaagatatgatgggcgagaaggagagggagctggatgctgttcgtaaggcggaggccgaggcacggaatggcacccccgggagagatattggcattggtggcacctttggacctgcctctggctctgggatgagggtttctctgccggttcacgaggaagctaagtctgcgctgagggatctacgccatggtgggttggtacaactggtaagttataccctgcctcgtccggatctgtgaaatttgaggctaacttcaagcagactgttgatatccccacggagaagatcgtcttggcccactctcactctgacgtcgaggcacactctgtcgccacacatatctcctcctcttcgccgcgttattctttctatcattaccccgggtccgatgtcgtgatcttcgtgtacacgtgtcccactggatcttcgatcaaggagcgtatgctgcacgctagctcgcggagaaacgccatcgcggttgctgagcaggaaggactcaagatcgagaaaaaggtatgcgtgccccgttgtggatggtcgtttcggatgctcacaaatagcagattgaggcctctcaccctgacgagatcaccggtgatcgtttgcaagaggaagtcactccatcacgagaccagggtcctgcgcgaggatttgcgagaccccgtcgccccggccggtaaatcgctattgtatagataggctatattcttgatgagaccagagagcctccgatccgatagttgtagtaaatatagcagtactgtgcttgactcgccaggttattgtctgaaactttggtagattcttgttctaccagcaaaggtagaattggatcaatggttagacattgatcggatcctcatataccccttgaagcgtacaattctcacagataacctgttcatatttgatgtttcctggatatctgtagccgtggccagttttccaaggcgtctaatatgatcctcttagttattcttggtgtaggttgtatgagcaacagaaagaatcactcgaggtcaccaagtgctggacacatgactggtgatttcctaattgatttgatgagctcgacctggaggtataaaagggctccctccccccaaatcttcctcttctcttcttctctcctccacatccctctgaacaccatctctccgtagccccatgagatagggtcagcagagggtcccgtagcacatgctgcctaacccaccacagggacatcaacatcatcatgttgtggaagtccatgtaggtcagcaacaaatatcaaaccgggctttctcgtggatgttcctgaagttgtggctcacattgccacttgacgagtcccacggaatacatgaagggtgtaaatctccgtagccgaagacttgtaggtagtcaccctggcagaggtagtcacatcactagagagaataattgattgctattatactgatgtccttgccatgttgaagtagtttgggatgaagcatacgtggatatttgttatcatattgccttagacaatcctactgagctctaggacgaatctcacgtacacatatcaaatcaagaacgaaaactcccgggtatttgtcagtgtcggcctaaagaaacataacttggcatgaaaaggtcgactatggtcgactataaactaataaatcacagtgtcctcgttatcctcaacgacctcgcctccgtcatcatctcggtgggcatcatgctgatcttgaacggcactttcctccacgttggcagtgacttcgtctgttttggctggatcggaggtttggcctttggtgtctacaccgaccgtatctggagcaccttgagctgtttccttagactttgaatctgtcggatctgcctcgtgctctggaaccgatggctggtcttgatgaccacctgtttgctgctgctcttctgacaattggggcttttcttcgcttgcaggttgttgtgtttcagcctgagttggttgtgtctcagcctgagttggttgtgtctcaaccagcattggctgttcgggcacaaatgcctctggtggatatcgggcttcaaactcggcgacttctcgggcaatagttgcctctgcttcttcgatttgttgttttaccgttgaatcgtcgccaggtcggggttgccatggtttgtaatactaaaatgaattagctgatggctactataatatgaacagcataactcaccagagccggctctgcctgtgtcttgaagaaatgtgccatagcaagcatattcgaatgccgtgtttgcatctgagaatgagaagagtcagtaaaaacttaatcaccatatacctcattggtatgtaagtggatagatcatgaacataccgcttctcgctcatacagcggagtttctcttctgcgaatctcatcccgctgttcctttcgccgtttcttcaattcaccgaactcggcatcctgtgatttcaacttctcttgctgctttttttcaatgtcagcgcgacgtctctgtgccgcggaacttgagctctgcgatagagtaccaagcagccccccgaataaccgctgaccccgcttgcgatcctcatctcgacctgtgcgcagtcgcgtaggctttttctccacagactcatctgtcgcaggtggaggggatgacggccggtgccgctgagaatgcggggaggtgttgtctgtagagctgagtcgtcggcgcttagtgtcgtattctgcagttgaagactttcgtcgcttggctgtcaactccggagactggatagtatcctggttgggaacggccactgcagaagcgagtgtctctgggctgtcaaagtaatatgcgcgttagctagagcgctccaattacaatgcgcgcgcgtgggttgtacggggtgatgaaagctacatacccttcagacatggtgatcggcaaacaacgctggttgtaagaaagaaacaaactggtggaagaaatgagcgacgttaagtgctccgatccgggtcaggtattggagttgttcaagaggcgcaaaataacgagacatgttgcatagaatcacattacttggagtcacgtgcacctaccatttagttggggcgttcaccgtcggcttttctttttctcctcttacttcccagcgagtgccaaatcatacttcattccactttctacagctttaatattctcattttcctgttacgccactcaaatcataatgtctcgtcaccaccccgatctcgtcatgtgccgcaagcaacccggcatctctatcggccgtctgtgtgacaaatgcgacggaaaatgtcccgtctgcgattcctacgtgcgccccacgactctcgtccgcatttgcgacgagtgctctttcggaaactaccagaacaagtgtgtggtctgcggtggcgagggcatcagtgatgcgttctactgctttgaatgtacgcgtctcgagaaggatcgcgatggatgccccaagatcatcaatctgggaagttcgaggacggatctgttctaccaaaagaaaagtttcaggaatcaatgatcttcaagagaggcttgtggcttggtgtccaagtggaggggagccaagcatgagtccggcgggtttacaatgttcagcctaacgacaaaatgactacaagctttacaactgcgagcacgtgaaaaacatcctgtcggtggactattcaaacctgctccgcgaatgaaggatatcaacgaacattcggacccgaatacaattcaacgaaatatccctgtgcctcggactgcttttgcagcatcatgcaacaatacccgacaagctggcaggcatggtggtaacgcgcgctgtactatcaaacctcgaggattcgcaatcaatacagacgatttggcgactaggaccagcggggctctaggtggagcagctggactggaagcaacacctgcagggttcgtgactgatatgtctcggtctcggtcatgtttcgtcgattatccagatgggtatggcatgatccaacccccaaatatgtggcttcaaggcggtcttcataaacattatgatgggtgggctttgattgagggtccctatctccaattccaattctgaataaagccatttcccatgcatataaactttgccactgtgataacttccgtctgctgttatgtaataatatcttcgacttttgtcaaacttgatccattctccgtctccgtggccacccatcctttcttgaacacctatgatcttatcaggcgtccttccttacaatgacaatcgtctatttcgatatttggaaagtactggccgcctagaatagacgaagaaaatgtaatttgcaacaactccacttgcacagaaacatctgtcggcgtctgtatgttggactgtttgtaactgggaaccactttcatcagtcgttcgagcattaagatgtcagtctcaagtccagccactttcggaatctcctagcgacctacctagtccgttacatttttgcatctcttcatcgtctaactttgagtgctggcagcaatggtgcgtatattcggattagagatattggcaagctgggtcgtttcctacgaagcagcgcctctcgaggaaggcatgaatctttcctcacccgagcccaatgcaaatcgatattgctgtgctagccgtacgtctaagaatgaacctccaatatatctgtgcactatgtactccgtgcatacaacatagaaggatgtagggtttatagagtgtcttggcgccccactaattgtttccaacgtgccgaggcacacctaagaggggtatgtcatctctccggcatgagatcctctccgggctagtttcatgcatgattatatatcttttattactctgacgccggttttccttttgatctgtatcggtctcaagttgtatagatgtatttatcgacttcacctgatatgtggggttgcacagctacgggattaaatcccgcatctagtgcgggtgatccgcatgacatatggtattattacagatagtttcaattaaaacagcaaattcaattaattgaaagtgaatgggtttttattctactgtatttttggtattagtattacactgtggaccctcggggcctgatcccgggttgtactttaacgcttggactctaaatagcccagacggtggccacgaatctgttctccccacataaacatccctttcccttactgaactgaagacataactatcattgcctgtatcaattcgccatgccagttgacaagatcggagtatcgggtgactcccgtattgagtataagaccgccacactcaacggccataactactgtgagcatagcatactttggagaagtctttctccagaataaatccgaactgacgatttgcagcttaccttctcagccagcctaaatcaggggaatacgaaagcactgtttttctggtaagcggctagctcaatcataaagccacacacgttgacatatcttcatagatccatggcttccccgatctctccatcggatggcgatatcagattcccatgatcgtagacatgggtttccgggtagtagctcccgactgcctcggatatggacgaacagtgagtccttctaccctaagatgggaatgaattatcatctaacaatccaacaaggacgccccagacgaaatcgccccgtattcccacaaaagctgcgcagcagacatcaaagccctagcaacccatctaggcgaaacccaaatcatcctaggtggacatgactggcaagcaacactgggcaaactccttttcccagaaccacaaagctaatacacaaagcaggggcgcagtactcgcttaccgcgttgtcctctggtacccggagctagtaaaacatatattcacagtcagcgtgccttattcaccacccatgaccaagaatatctctatcgaatacatggtccggaacttgtcaccgcacttcgcgtaccagctacagttcaagagcgagaaagtggagaaggctattcggtctaaggctgagattcgccagtttctgattgcgctctatgggggtcgtacgcaggagggcgaggtggggttcgatgccaataacggtgttttgtttgacaaaattggccagttgaagccgtcgaggttgttgagcgaggaggtaagcgggcttagttgattttggttcggggttggggtttttatgttgactttctttctctaggagttggatttttacacggatgaatttgctcgcaatgggcttcatggaccacgtatggtctcttctgggttcgttcgtcggacgcttgctaattatctcaatagttaattattaccgcactggtgacttggactatgacgatgaacttcctattctcgagcgcggggtccaaattcctaccctgtttatccaagcgctgagagacgaggctctgccgccttatttgggtaaatctatggggcagcaggtcccacggctgaccctggagcaggttgatacttcgcactgggctctgtgggagaagcccgaggaagtcaatgagattattaggtcttggttgaatcaacaatattttgctgatggaaggtctggcaagctctgattgaaggaacgataggtatagtggcacagtgaaaaaacaggattgattgattattgtgaaaatacgtatttcatatcggaaaagtaaaaagaacatgcgcttcataacaagtcgagccagcatagatgcacaaactgggactcaccccgtaacgatcaaactatttagtactggagaaccttagtatcaattatgcagccgaccctctctaagcggtccacgtagtcctgacccagcgtagcgggagtaacaatgccaccgcgcgagacctttttgatcttctcctcctcgttaagaataaccatagcagcctcagccagcaacagtccagtaaaggggtacatggcgccgtggtaagtgatcttaccgaagacgcgctgtaccggagcactctccgcagtagcgatggcatggtactcgagaaggtcatttgtcgagtcctctctgcgcggaccactgccaggggcaaagacgaacttcttcaccagccagcgcaccggcgacagcgcaagcagcgaaagtgcaaccaggaagccgatgtgaatggcgacgccaaccagcgcgttacggaccgacaggaactgacggaagacgaattgctgcccgtacagctctggcatcaagctgctgctgcgttgcacgatggtgatgtcgcagataccggacggggaggtcgtcacggtacccaggtcgcgaattgaacgcacgccgaagatcttttccaggattgagtcgcgagggatgtttttcggtggcggggatgctgccaatgagaagggagtcattgacttggatagctcggacattgaaaagccctcgaagatggttagaatagtatttatggtgccgccgctaggaccggaggatctgttgtgaatggattagaaatgggtttctttgtggatatgaaattgcatacctcatctctttgatggtgctgtcaatctggcgggttgaagacgcgaggtcctctcggactcgcttaaccagagaccatgccaacagatcagcaggggcactctcgacaccgttacaagggatcatctgttcgcaattagcatgaatgtatcttataggaattgggtgcagaacgaacaatagcgccattagccttggcggtctcgtggtacttctcgatgatcgacttgatccagggtgtttctccagaactgtaacgatcagcaagtgtttgaatcagatatgaagcaaaactcacacatccacatagtgagttccattgacagcgcatgcctccacaactggggtcgagtacaagtggtatggacccacacagttgataaccagccgcgttttcagggctagctcgttgagctcgatagagtttagttgaacgaccaggacatctatgatgaccccagggtgagcattgagatataagagctatagaaaaatgggaccgtaaggttatgtacctgcgtccacgcggtctgggttaagacccttgagttcctgggcgatagactccagtttctctgcggatcgacctgcgatagcccatttcagatcggtaggaagatgctgcacaatgtgctctgcgcaaaatcggccagtatagccagttacgcccagcaaaaccaggtcatactgtcggttggaagtcatggtggttgagtcgatgggtttggagtttatgatgtagttgtagaacaagggaggttccggcaaatcacaagctcctcggcacgtttcaaaacgcagtgtggggcgttggaaataggagtagttggaatagtcacgaaagagttcttggggctttacatagaaatagaggcaacttatgtcacacaattgagattctaccttgaccagggaaccgcagatgtttatatttcatggcatggaagaatcacgtgatcggatagatcaattagcccgagaaaaggagaccgggggggccggtggtttcgaacggaatcaggccggattgggatggttttgatactatacaaatctattattgtacagggtcatcttgaatgatgttagagggaaagagggaaattatacatacatcagacacctgaaatagaaggcatcaagtgaaaatcaaagttttcaatatcaagtatcaaatcaaacagattcttggaaattctaccaaaatcaaccaggtcacatccaccaacatcgtcatcgcctcatctggtggaccttgtggaccgaaacacaccaagtaagcattggaaacctgaggccatcaacttgctgatgtaagcccactaactcaaaatggtcaggtgatcacaccaagccaagagccctaagcgagaatccacagcacaacccgccctcattcaaagcgtcctttttcggtctcctgttgaatacccatcttcatcctctccaccagccaagatgacgaagcgcaccaagagtatgtgcctctttctcaaattcaacacaccgcaaaacgaattgctcaatgctaactattttctacagaggtcggcatcaccggtaaatatggtaccaggtatgacatttgtctagttcgcgcccacacgactgtgatttcctcgatcgagacacacgacccttagcgaatactcctatacgacgatcaggattctaacaatatcccaacagatacggtgcctccctgcgtaagcaggtgaagaagatggaagtcacccagcacgcccgctacgtctgcacattctgcggaaagaacaccgtcaagcgcaaggctgtcggtatctgggagtgcaagggctgcgacaagacagttgccggcggtgcttacgtcgtctcgtaagtcgcccgctattgcatggagcgacactgtgatgcgacctgggcattgacctgggcttgcgcacacaatcgcgatccacaatgtaccaaaagaggaaagattgctgacagttctgttttatctagcacccccgctgccgctgccacccgctccaccatccgtcgtctgcgtgagatcgctgaggtctaaatgggaggattatgtggtttcatttctctttacggttacccaaaaatgaatgaaaaaattcgggaatacaattcttgttgcaatccgcttcggccccgagtataccgtatatcgatgtgactggttttcaaagttcgtctcggtcgctgcctacatgatagacaatccaccgcaatccagatcctccacctgattaccttcgacgttctgcgaccgcgtgagtcatatggatggactgcatatttgcggccttttgtggtttcgcgacgctggacagtcacgtagactcgacacaacatcggtggtcttggtttggaggtcacctggtcttagcgtattgtctgggtgcttggaccgactgcgctccggactatatctttcgtactttctacgtgcacctgaacatttgcaccaggtgcctagcatactccggcccacatgatatatcctactggtacgatccggtcgcatgttaacccagggctccgggcaaatcgatcttgcccgacgaccaaggtgaaaactgtccaggctgcccagtgattcaggtttcagccaaatcatgggcgcctaatgtagtcatttttaatttgtagatcgacggccaccttacactcgggactctgtgtgtattttgtgttgtacagggaccttgttggatggttgcaggatgtccatgaccagatcagatactcaagcataattagtagccataaaacaccaagtccaatagagaattcccaaaatttcaaatgtagtcatggtaataccaagatcgcagatagtccaaacccgccaatccagggcatcgtacatcattcgcctccgtcacgttcctgctttgcgttagtccggtaatccggcccaccttcaaaaggcgctccccacacctttctcgcttctacacttctcgagagtcgctcttcatggacttcgccttctctaataaatctgtttctcatgtccgatacctgtattgtttgtttaggagaccttggtgaaggagcgggtgatcctcttgagcctgtgagccttgatttgaaggatggcgacctcaatgggctcgactctcagatcgctcagctacttccctgtggtcatgtcctacataataattgcttaaaaccatgggttgaacgagcaaacagttgtccaatatgtcggcgaagtttcaatatggtggagttgagcgatagtgtcggaggtatgacgctgccccttccttgatttttgtgacttataacatggtggttacaagtactgactatattgatttgttataggaactgttacttcatcctacgctgttcaggaccgaactcaagtggccgaagttgacccttctatgattattgaatatgtggaggatgacttgatcgatttccaaccatgtacaatttgcggacaagccgataacgaggatgttctccttttgtgcgacggatgtgatgggccttctcatatatactgcttaggtttgaccgagatcccctcagggtcatggtactgccaacaatgtgaggagctacgtgctcagggacctgctcccgaggtatcagcacggccgtcgcgggcgatcgagcagcggagtcggcgaactagggcccagcagagacgactacagaatcggactcagacgaattctctacactgggcacgagtctggcaatctgtctgggatcatctgaatctcgatcttgatttccctttcgatgacgatcgatctgccgaacgcgcgctgcaacaacgtcgtcgcgaggaggccaaccagcgcgaatttcaagcctggcaacgccgctttgaagtcgctgagcgacaaggtggtggcagtcggtttcgcgatacagcatccctgttcgatcttgaccatgcccgaccatcccgacctcgggttcctcgagttccgacaccagagcccgagtcgctggaggagatgcgggcttggaacgccttcgagagggcgcgggagatcgaaaacaacccgagtgcagccaggaagcgcaaagagccaaccatgtcgccgtcccccgagcccacagaacccgagcgcaagttgaagcgtcctcgaacgaggaggccacaggagctcgcggctcgcgcacagcaaactcaaaatggggaatcatccagagctgggagctccattgtacgaccgagcagtgataattccaccgggccaagcttcctatcgtcgctattgaaggaagtcgaagacgcaccgaatcattcatatggaccttcagcttcgacatctgtcggtcctaccgaccatccatctcctggtttatcttctccctccatctctcccgcctcatctcgttactcctcccctgtcctctcggctacaccaccacctttctcgcgaagccgccccatctccccttttcaactatcatcccccgcccaaccctcatctcctcctttctcgcccgaagtgtccctatcgggtagtccgtcgtcaaatggtgccaaagaagacaaaccacaacggcaagccgatcgtcctcgctcccgcatcccccaacgagcactgtgtttcggggcatcccgctcacctgactcatctcccactcgagctggtccatccctggccctcaaagccgatatccagaaaatggtgggcactgggttaaaacctcactacaagaaaaagaccatctcgaaagagcaatatacgaacatcaaccgatctatctctcgcatgctctacgagcgggtcggggacaaggaaacgcttgagccagatgaacgcaccaacctcgaaacagaggccaaacacgaagtgcagaatacaattgacgcactggtggtgaagagcaaagagaaacagaaacagcgtatggtggcgaccgacacaaacggtgatctataatgactataccacgaactctccccggcatttaatggcgtttcttctcatctcagcgaatcatactccccggcggaacggattggaatgtataactggcgtttgatccttgccggctgtcttcttattattcttcttgtccttcttcttcttccctcccccttttgcggggcatctctgtgagaactattttttgttcgtcacctccttcgacgagagtgattatttctttttttgtggagctagtctattcgcgttctctttgccccatattttgtctaaatattatttaccttcaaccgtaggacgaggtacggccaccttaggtagcctcgccatctttggtttattgggtttttttatctcctagtcggggcttgcatgcatacttgtaaagataatctctgatgcataatttatagggacagtgacgactcctgactcaatcggggatcgatttggctgcacgtctatggataattctaaaaagtacatatagtaagtacaaaggaggttgtggtatgggagataaagctgattttgaacagtgatgccacagtctgacatacgaaatatcccagaattgaggattcgatcagaattgacagccgtcctattgaccacatcgtcctggtagtcgacgcaatttcatttcaaaaccgatagataagtatagtggcaccggtagcgaaagaggtcatagcaataaatccagacaattcttcgaatatagttggtcgttggaaagacaaactaacgagcagttgaccaaaccaaaaagtgagagtcccagccagtgctagccactgcccaaccaatgcaccaattttgggggcccatacagctctctgacaatctgttcgaccccaagatcctcaattcctgcctgctggcagaactgggtcctggacctgcggtgggaagaagacggttgggggtgcataattgggaagtttatggttgtggactgagcaggtcgaacgcaggcagctgagataaccaggtgcatgcatacgagcccactcagccactggggtactctcggttagggggagtgagttgctgtgaaatatataggaacatgtgcttccgaagagggaaggtgggtcttcacacgttgatgcctgaatagtataacgtttctgcctgcagatcatagacacttagtaactatgtagtacttggttagtattataatgtacatatatttctctacgacaatacaagaaaaaagacaaaagcagcagttagtcggttaaaaatgaaaaaaaggacaaaattcattgttaactataggaaaactgatctgcttcaccataggacttccatcctagcccagataaaaagggaccatagatcacattggacacccatccacagttctaccctctgtgttttcaccttgtcaatccatacttcctgcactttctggttcgcagtcatagagtctggggtaaatgtggagatattgccgtagtagggatagaccttgccaggaacaatgccgttgatcacgacaaagcccagctcctcgtcgataaccaggttgactcgtgcgctcgggtcattaggtctagtgttgtcccaactagttgatcaacttggctccgatcgcttatcttttctcatgggtcgtcctaggctggcgctccggcagacccagcaaaacgacagaagttctgtaagtttcctccatgtagctcaatcagaaactggcaattcttgcatggattggcaactgcattccaaaaacggccgctgagggtgtgtttataccgcggtgccctcagcgctttctttcttagagcgaggccgtgaacatttccattggtcgtattaagtccgctgtttatggtgatatgtcaatatagctcattgccgcgagaaaaataacctaccgcaagagatgaactataggatacgtttccgcgcaattgccgatggtttggtatagttcgggcctcttgctgaaggaccatccagacagtgtaatatgctcaccacccacaagccagtatctagctcgcttaacgggtaatcgccaagacccaacaaggcggtctttgtgaacgcacccaccaagcgaagcaccgagaaagaatttattcaacagacctaataataggtccaaagaagtattgttgtcagacgtctcttgtctggagttgctgggattggcgcaatctggtgatatcggggtagcgtagtctaatcgactaagagtcgaaaattctatgcctagctctcttccagagtttgtttgtctcaaggaagacagcctggtcatatgttgtcaacaaggcatgcttgagctgcatggagtcttatatgtgtcgtgcaagctggcctatatcgggttagagtcttgaaccttaggctggagaaaaattcttactgatttctcgacgaaagctccggtcatttgcctttgcgggctcccttctcagccagacagatcatgtgccaatgctcagtccttttgacctcgctcacgattttcgcgtttagatcctgccggggtaatcgaccgatgcaatcagtcccatatcgcgtaccacatccctccatacttgaactgcgccgcgtgaagctacctcatgagccccagtcaagtgctatgatcatgcaccgagtgtcgtaattggacatctatcgagtagagctcgatgaaaacttttgcacgtgttagaaagggaagttctcaatggcggcagctttgacgtcgttccttcctatcctgcagagcgccaagtgagttggtcaagggtttgcaggatttgtagggaccactgaagacccataatggggaggaaaatgatccggcaagaacggtaagaccgttttgctctcaccacctcgataggaagttcctcttattttttatgatcctccggatagctctggtcgactacccgataagcttggatgtatcatgattccagataatggtagctccggcagcctaactctgcatttagaatctgcgaaacctaaatccaactgtttcgtgttgaacacggcactcaaaacctcaccaacacattcttgggctgctcatcaacagctatcatgtgctcgaatgtcattgaggtgggctgcaaccctgaagagacagttatgatgggttgcatgttatgctccttatcgctcgggtgcttgagatggttctcgtcatacttggcaacagtcatgaagagctgatatcgatcttgggatatatgaaagcgcctatatgatgtcagtagtattcgtagttgaccaaggtggctaggggcgaagggaaccaacatattcaatcctagggatggcactgtttgccatgtgtgaggacccgtcattgattggaggaggcatttctcataggagttctgagaatgagattggatttgccattttccagagacattttccagagatggctacacaaggatggcctcgatcagggagaaagactgggtagcattccaaaggtaatggtgaagtggatggggagagagacagcggtggggggaggatctatttatatagcaatatatagcaaacaataccccgtatgtagtgccttcccgatctgactataagaatagccgtcttaccgcccccatacctgttccaggtatgggtctgtcccacataacagaagattgccacataacggaagttttgggattttaggtatcttttatatggtatacccacacaaaaggtacataaatataaaatatacataatagagattttgtcacttctatatataagatatccgagattttttttattagccaatcaattcaactataaatttattcttgattcatactcttatttctcctttaactagccaaagggttgagtacataatatggggtatatgtaccttttatatgagtggctacccgtggacgtagtaattgaccacctaataactagacagaaataggagagtgagtcgccccctctaataatatgctcctttgatttaatatctttgagctgcttaaggatcttaggatcttatgttaaggggatagggttagagtacagagtactagatgattgctttttttttttctgccggctggatctattctgccgtttctcagcgattactctttcaccgactggatttctatttttttcgacccagtagagagcgcctagtcacatgatctcctttcgaggcgttccctccgggtgcccttccggggcatcccttcccagggggaaagggttattttttatagttgcttcgcttcgctccgcaataaagtatagaggtagtgaagccctttgaagaacctatgctatgatatcattggttaaataaaagtggatatagttctcaataggtgggggaggcggggatggtgcacgtgcccttctctgcacaaagctctgacatatgtacaacgctgtgccaacagtggttacccaacttaactactacaactgaactaactacaacttgcaatttacatgattcttcggactttgccagacgactaccttgacagaagtctttttcccacgctgtctgtaatagacttgtgttgacacctgggtcatgtagcccgagttgctctctgattcttcaagctaaatactgcttgtcagtttgttgaatttggatttatgatggttatcacaagttatacatggaataaagtcatcctgaggttccaaatgcaaaatcgctaatatgatctctggccaactggacatccaaaatatcaagtcctacatcactaggctatataagcattcttgcggtgatgaatggagagacacgaaagaaaagaatcaagtgatctaaagtcttaattttaggcattgacacttgcactcttcgtcattccaattcccacagcagctgttgtccctgcgtcaacaggcagaataacaccagtcatccaccgagcatgaggtccagcaaggaatacaacagctccagcacagtcccatccatttccttcggttcccaataagcttcgtttccgacgggcctcacgcgcctcttcgctcatgcccttcccatacatcataggcgtgtacagcatctagtatcatcagcttcagttccatacaacaaacatgttaaacatactcctggacagacacaatttacacggatcccatcgagagagtgatgagccgccatagcacgggtcatgttgactacagcacccttggcagtcgggtatagcagatgaggtgtgccacccttcaacccagcaacacttcccatgttcacaatgctccctttgatctcgccatcatttcgactcatctcaggaatggcatacttgaccatttgtaccatgctggcaacattgatctccatactcttagcccactgcatcatatcaacttccaccgcagtgcccgccgcgcctccaatgccgacattgttgattaaaatatccagtcgtccaaactgttcaactgcaaagcgcaccgcttcttggcagtcttcttcggatgtgacatctccccgaatcgcaagcgctcgtccacgaccgggtttcgagttcacgatctccacggtcttgttcgcccactctaggttgaggtcgacgcagattacgtcgcagccatcgtcggcaagaaggattgaaatcgcgcgtccgtttccaattccatcacctaggcagcctgcgcctgttactatggcgactttgccaactaaagaacgcgatgggggttccgatggaatgccagactccatggttttcgatttgatttggtttcaattgagattaccagttaactataactaagtaaacagatgcggatacagtctaccttatacccttatacttgctgcgtcttttctctttcgcgatatgtctacatattccatcctcatgcggggttaccaaatgccgatatacgctgttaccggtagccgagccgaggtgatgtggggggtaaggtgatggcgctattgtctctcagtgaaatgtatgggactacatttgtacatgaattgactacccctccatgatgcccctctctgagtggctctgtcttttgacttggcggggtttactaaacccccatagatgatcagcttcttgcttatctcttatttccctcccttcttctttggatattattacctttgaccactacaagaatggccgacttcactgaatatggtaggccgagtgccgaatggatcgacctcgagccgacgctgcctaagcttcccacggacctttcggcggaacaactgaaggcattgctaaataagggccgcgagacatccgcagcccaagatatgatcaacatcggtgccgcagtccagctgcacgactacacaatcacagcccgcgacggcgcgacgctcgaagcacgcacctaccgtcccgccggcgtcccaatttccgagcgcctgcctgtttacgtccatcttcacggtggaggttttcttttcgggacactttcttctgaagatgccatttgctcgcggattgtcacctcacgtgtccagaagggtaccccagtcatggtcttgaacatcaattaccgacacactcccgaatatcaatatcccactgcttgggacgatgtcgaagacgcatttgtctggctacacgagaacattgccgagattggcgggatcggcgagcaggttgtcgtgggcggtatctcagctggtgcatggttgacggcgtcgttggcgctggctcagctgcgcggcgatgataaacgcttagcagcctgcccaaaaattgcaggtcaggtcctcatgattccttgtcttgtgcatggggaccactatgcgccgagactggagttgctcaagagtcctgatttgtcgagctatgtgcaatgtgccgaagcgcctgtcttgccggtgactcgaatgagattgttcaccgatcttcttgggattagcgaggccaaggatgctgctgcagatcgtcggatgagtcctggtaatgctaccgcggaagaggtcaaggacttgcctcctactacatttggaatcgcgggaaatgacccattgagagatgagggtctgttctacggacagcatctcgctgaaaacgggtgagtttgcgtcttgaagatttaggtgttcaaaagctaaatatttcattagtattcctaccaatgtgcatgtcttccccggcgtcccccatggatttaggaggtacaagcagctacccgatagcgagaggtgggacgaggttatgagtgacgggattgcctgggcattgacaagtcctttacctggtccatttgagatcaagtccaaataggacactaagttgaaggcggaggatgcatacatcattttgtatctgttagggatatcaacaacatagtcgtagttaccctgctagcgcagccgaatcaagtgtatgtttagcgctagacgagtatagtattaatccaaggaaatcatcagattaaataaagcagacatcaatagaagaataaaggactcgaagaataaaaccaaggcgattcaccgctcggacccacactgccgattgtccgatctggtagccgccaatgcgagtcttcctattgatttactctcctattttttattttctattcaacttcaattgtctgctcattatgcatgtctattgtgcactacatgcaatgtaattctaatccgctttcaatcccgcattgaaataaagggcgggcccctctccgacaaccatcgcttttgcgcaaagcattgcctcatttcttgtgcgcaattcggaactagagctttctgtcctaaaagctcgtatcgtgtcattctctcgtgctcaagcgttgtcccgcgaaacccgaaacccactcatcacaatgcctccttccgcctccaccaacggagcctcctccacccccgacgccctcgaatccgacctcctcgtcaagctgtccgccagctgcgcactcgaagatctgcaggaaaatctcctcggctcgctccatcgcctgggttggaccgacaaggtcaccaccctcgccacagaactcctccgcgccggccgctgtgagaccttcgacgatgtgatggcggcagtgctcgcttcagcagagggccgaacccaccccgcactaggggcccaggtcgcgaacggtgaaactacaaacggaacaaaagagaccaacggtgtcaggaaaggcaacaaagccaaaaatcactcatacgaccctctgaagtacattgaagaaatcgatatccgcattccggaaacggtggtcgacgagggtgtccgtggattgaaggatatcatacgagaagtggccgacttggagggagagagtgcgcccaacggcgacaagaaataatgacagacaccgggcgctgggaagcagcatttgaaaatgcgatcatgcatggcgggtttctttctaaggagtacagattgtttcggtctggctgcatcaaattccattggtttacatacgaagtctacgggcgctcttacatttgaatagactaccaattcacactggggttttgaatatccccctttttcaaagcactgcattttcccttgaagctttggctcttctaactatagctcttgatgacgcagtaggtactccaggccccacaaagtctactcgattgtctttaatccccgcaaatcgaatgttaccgtgaaaaagtatgatcctggcatggattatttctcatcggcttactttttcggatagccgaatcaagccctgcggttgagacgggagacgctcggcaaaggccacggattattagcccgaggctcggagagggacgtaaaattgactagtacatacttagtttttcggaaattgatatactgcagttctcattcaaatgcggcgattgctaatactcttaacaaaagttgtggtattgtcataaccaacgccgacatcagccatgcctctgctgacgagctgtggcctttagatggtgagatcataggagtaactcttttctgacccgttctattattaccactgtatggttcttgccccgccattgtcttcatcttggtcaaactgtatggatcatagaaggctaatacttgccccgtacaaggcagactggcaatacaccagcagtaaatacgggctgagagctctgatgaggacagcacctcaagaagatgttgcaatatgtcttgaacttgcaaccaatagaacaatcaacgataaacatccaccatcacttggagtataaacctacataaactggtatatccggttacaggccactcactaatagtcacgcctaaacctgttttcaaggagggcttcaaggatgttggcatatggaccataccgaggacgggtatctcaagcgcagtcggttcagctagcatcatcggagatcaaagagtgcctggttggagtaaaggacagagggagctgccaagccataatggttcgtaagtgcttggcatcattccaaggtttgatgaaggcgggggtggataacaaattcaattcgatcatcccagagatattgagtttgtagatagtatattccccaaatcaacagaaaacatattccgagtttggaaaaaggaagagatgtagttatactcttcgaggttcaaaagagtccaggcccagtcacgtggaccccgttctcatcagaccagcatcctcttcgcctaatctcgacctttgcgctaagtttgctcccagacgtcagtgaactttttgcttcggagaatagagacgtatcactcgctttaaccggtggccttactttcttccaacgcccctatcccgccgtggtcctgaaccgccaaccttccccgctttcatcttgttgattgccgcgtgtttgcactcgacggcaacacccctcctcggaaaggagttatcgagaacatatttcggccagaacaggagatacccaataaaactcctccctgtcggaagatcttgcgaatccgcccatgtttgacttgaaaccgtcaagtcttgacgtcccctcgttctgcccgcgcgtcaaaagatagagcattcggcgcattaccgccaacactcattttgtttgtctttgctggccctagtaccttggatctggcggtggcgcccgtgaacctcccatatcattcatctctactttcggtgaatattctcttgccatcgaagatctcccgtcatgtctctccatacctcctaccacgccgactccgatgcggacgatgagtacgaacgcagtgtcataacttcacctcaccttcccatcgactcggaatcttctcccacggactccgatattcattcaacagaacacaccccgaccaaatttggacatccgatcgatggtcctcgttcaccgcgaacactcatcacggaatggggagttgatgaatgcaatgaatttttaacatcacttggattgctgcagtatcacggaatatttcgaggtgagcagattccttcaagtatggttaggcagcgctatttactaaccataatctctgacgcagagaatgggattgtcggtgaagccctggttgccctgaagcatgatgagctgaaggaaatgggcatcaacagtgtaggacatcgactgacgattttgaaaagcgtgtatgaaatcaaagtcaagcaagatgttcctctcgatgcagaccattatatcccacttagtatgttcccagacgtcctgatttaaccccacttctaacccgtgcttgcagcggcggaccagagtatgaatgaaactgctacacaagaggatctcgcgcgtttaatcaaatcgatccaagttcgagacgaaaaactcatgctggttgaaacagagttgcgccggatcacagacgattaccgacgattgcgcgaagaaattctaccagtgatcaagatggtaaaagatcggtcacatccattacctccacccacttcgcatggacaatcagaaaactggcacgacagctcggccactctcacgtcaactccccaacccactatcacccaggaatcttcatcatctaaaattgcgcgggctttctccaagcgcatccatcctaacggtaattcatccaaaaacaattcgccaactcaccctccacctacgggctatgatggacgcactcatcacgacacccttaatccgtcaggcactgcctcatcccatctcacagccgggtcgcaactatcgcccggaattccttcacctacgtcgcctcaccaccaccacgctcaccctcaaaccctcaatccacgatcatacacccaaccactctccagcgcgaatcgcaacacatcctatgattatgccgaacagacgccgacaatacattctagagaccgatccactccgagtcagcttccagcatcccgcgccgagacaccatctactgcatcacgtcttgacccacgactcgacaggtctgactcacggggtggtggcggcggcggaggtggaggcggcagcgaaaacccaaatagcgtggaaatcttcaaatcatttcgggtctcttgggaagacccatgctacaaggtcctaccggctgctcttaagaaatacaacatcaactctgactggaagaactatgcgctttacattgtttatggagatcaagagcgttgtctggaattgcaggaaaagccccttctcttgttcaagcagctagaaaaggaaggacggaagcccatgttcatgttgcgaaaaatccacatggacaaccctgcaggcactccagggcctgcattagcgcctaatagcgctggcttcgatggtggccgacaaggacaaatcaatcttccaggcggtgtgctctgattcttctcaaggccaaccttcgtctgtcgatgcacgcatgtctgtggcttgagatacccggtgattttcgactgcattctttcttccgttgcatttgatttttatgccactggactatgtcgtgatgttggttttgtcggtgtttggtgggccgggcatgaatttatggatgacactggcgtttctgcttttcttgacgcttcgattccagactcgttgatgtcccatgcagcattatcagccttttctttttatttctttcaggatatccttgaccggcataggactttagtccagtgttttttttttatcatagcatattacataccgagcttgtacatgagattcccattgtttattcacatcatctagttacgggtttcaatcttatgtcagtgttttcaaatgagacagcccatatattacaaatttgtacaaagggaattactttttaagctctaaacaatccacggcagactgcatgtatgagttgttcgcaagctacggagtaggccttgtcaggcctaatgtgctttgctaacacttcaggtgcaattccccgaattcattagcccgtatctcctgtaactccatgttgccctaatcttccaaggccaagagtgctctacccatctgctgccagattattcaaaacatcttacgaatatacccaagagattgtgattataatcagcctaaagcaacattatattcaatatctatactaaatcacataaagtgagcgagaaaaaaaaggtatgtgacgtcctccccacagccagcgcccatagggcatcccgaaagataccctagcgtagctataaaagtgttgtataaagaggaacgcctttctatactctccagggccgggaacggaagaaaacccatgaaggccgaagcccaaggataagcctcagcaagccacaaagtggagccccgtgaagttgatagaaaagaaaaaagaaaaagagcaaagacgcgggcgagccggtcgtatttatgtgtctgtgtttttttttctacgctagagctgattgggcctcggttaaatggttattccggacgtatatattcataaccttggaactaagagatggttaactaacaagcagaaaagaattccctaacaaaaaaattcaaagaagaggtcgtgcccgggatcgaactgggattgctggtatcagaaaccagagtgataaccattacactacacaacctgggttgttgtgtggatctcagtgaaagacctcataagccagggggtccacttccttactgggaagtacgcaaaaatagccctaaaagattcggaacgagaattattagttctacctcaacctctgcaggtagaattgttagagctgtcttagggaactcatactcaatgggtagtctggatctcggtagctttttactattcctttttctattctcaaatcagctacatagttgcctttggagcgtctttcttgttgcggataatcttaagggcattcggcctctttaaatgtggatatgaatatgaacaaataattgcccaatagcgacgtccattgatagtatcacattaagtgatactattttactacttgcagctacacaatatttatgattacggagccattgcgattgaagttaataagtatcaatccgaattccagaatgtggacgactttcctatgcataactagggaaatacctcaaaattctttgtaatatagcttagaaaattagatcgagtagtgtgaagttgattattgtaggttctgaacataaaccttctggcaatccatgatcttcctttcgcggttcttatatagttcattccctgcaacaacatagtgagaaaatagtcgcccaactgtagatatcgtatatagaatcaactttcaaatcgagatccaacaaattcggttgtgtagtgtaatggtcatcactctggtttctgataccagcaatcccggttcgatcccgggcacgacctcttctttttgattttttttttgagaattgctgaggctattttctaatcctttaatatagttatgattagttatgtatggcctacacaacttcttaataacaaagtatctccttttctttttctttttggatttttcatagcccacttatttatatctcatcggattaatctacttgtgtggaacagttcaagctgagttttagtgatctagttcaagacaagtccaagggcaattacatcgtcttagcatcatatatacagaaacgcattagtacaaaagccacgaagaggaaaagccgtataatccagcatcagacctccttcatgccgagtattccacctgctcactctttgcatcagccatttccataacctccgcatcagaatccgcaaatgccttgtcaccgaatgcaacagcaatctcctcgagagaacagtgtgctgtctcgacatagtaaaagtgaactagaatggccgaactgagacagaatcctgcaatcactaggtagaaataaccatgaatgccggcgaaagcgtccggagagaccattccaatgatgaagttaaagacccaattgctagtcgtggccagggccatgcctttactccggccccggagtgggaagatctccgcgggcagaagccacggcatcggaccccaggtgaatccgtagaggatattgtaaagcatgacgaaggcatattggccgttcgctttgacttgaacatccacattaatttcggtgaagacgcagacaatggctagtagtacggccatgccgagacctgttttgatttttagctttcactaatccgatgctcgccttcatggcgatatatatgtgggaactgacctccaagaatgagcagaggctttcggccccatcgatcagccaaccaccaggtaacaactgttgcagcggtgtagggaagagcatttgcagcagtgtacagcagggatttgcgattatcaaagccagcggaggcgagggtgctcggaaggtagaaggagatgatgttgattccgttgatctgcgcgaacatctgcactgtgattccaacaatggttcgtttgcgataccgggtgaacatttcctataaagtgcgatccggtgttagtaatgcacgagattgacaagccacacaagtagtaaagggatcgttaccttccaaccggactttccaagattgtgctcatagataaccgcttcttgaatctcgaggaacgtcttctgaacaacctccgcctccttattaccatcagaatgtaaatctgcaattgtttgcaggctctcgtcaatgaacccattcaaagccaaccatcgaggggtctctggtaggaagaatgacatgacaaacaagacgaaagagaacacaatctggatgatgaaaggcccctgccatgagatatggtgtggcagcaagaagttaaacccaaagtccacccagcaagaaatcatatatccagcgatcaaacaactgtactctatacccaccatcaaacctcggcgatgagaaggagcaatttctgtttggatgataggcacagtcatagagaggaaacccacgcccaatccttggaccgtgcggcctccaacgaacgtggcaaaatcaggggcaaatatttgaatgaacgagctgaagaagtagatgaaagcgccgacacggacacacttctttcggccaatcatgtctccaagacgaccggctatgagtgatcctaccgccgctgctgcttgcaaacacgcaacagatatgccggtgatcgcaggatcgaccgcagtggtcgtcccatcagcacctccatagtctttgaagaagcgagttataaaaacttggttgaccagcagcccggacatgatacctatcaaatcagcagctatatcttgacaacatattcgaggacgccataccagagttataaccgaaaagggcatctcccaagcttccaaaggcacatgttgcatacaataaggatttgcctgtcaacgggtaccgggccgtgatcttcttgggtttgagtttcctctctagccagctctgctgctgctcaacttccgcggcgacagcgagggaacgctctctgagagtcgcaacaggtgccggctcggaggattttgtgatggccatgctgaagatgaatcgaccaacgaggacagcgtatcaaaaccactcgtagatttcatcaagagataagggggcaagggctttatttataccccagaccatatccgcgtggaagaggaattttctccagaatgatggggaaatggatcctggtacactaggtacactatggggtcaccatttcgccgggctaccgaagccatgtgtttttcatggccgggatgagacaatacgggaatacgcggctggctgggcatccctcgtgatcggccgtgaaaaattggccctattattgatcatttagacctagatgtagtcaaattcgagtagtctttgttcaatagtccatcatatgaccgatctcgccgtgaatctgtggggaactaaacggtttcgggactctggcggagccctcgtctcggttccggtggcgaatatcacgcggttccggggaggcttggcatatctcgaagattgtgccggcggaagacgacacggttcctgaagttgcgggattggcatcgggaagatgcgggagataatgactaggataggtgtgagagggcgagaatatatagtcaactaaggcctcaacgaatttggatgaaattgagccgtggatggccaccatttgaaccaatttatgcttcctcggtatcccgtatactagtccggctcggggcttgaacaccgatggagacctcgcctggagctgatcgactatccgccggaaaactttcaatacataggatccgttcgcacatgtaacgtagtgggtaaaatctgcagggcatccataatatttaaagcttagtagaatcccagaaagccctgctcaatcaaaccaaagaaatccgcaaaaatgaccgtcacagaagctgcccaggtagttccaacctagtcgcgacccaaacacatcggtttaatgcacctacttactcgaaaattcatctaggctaccaatgaagcctttgtactgcatcccggaggcacatttgctttcgaggaacgcagcgtacccacaatccagtcagaccgagatgtcatagtccgagtcatggcaacaggtctctgtggttcagatgtaagcgaaccggcttcgacttttccattccatttctcgatgcaacgaaactaacaagaatcctcgtcgcacaggtccactactggcaacatggccgaatcgggccatacgtcgttgaaggccccataatcctaggccacgagtcaacaggaatcgtggtagagaccggaagcggtgctcaaggcttctccgttggagatcgagtcgctctcgagcccggcatagcctgcaacacctgcaatcactgtcgcaacggccgctacaacctctgccggggaatgcgcttcgccgcgacacctccatacgacggaaccctcgctacctactaccgcgtgcctgcagaatgctgcttcaaactcccatctcacatctccatgcgcgacggcaccctgatcgagcctcttagcgtagccgtgcacagctgtcaattggcaggctttatgcaggataaatcagtggttatattcggagctggccctgtcgggttgctctgctgtgctgttgcgcgtgccttcggcgcgtcaacggttatagtcgtggacgttgtcccggctcgcctcgcttccgcgatgaaatatggcgctacgcacacataccaaatgagcatggaggcggcggacaagaatgccgcggatttgctggcaactgccggcttgcatgatggtgttgatgttgctctggatgcgactggcgctgagccttgtctgaactgtggtattattgccctcacacagggcggaacgttcgttcaagtcggcttgggaaaacccaacccatcagttccggttggtctgatctgtgacaaagagattgttttcaagggaagcttccggtacgggcctggcgactttaagttggccgttggattgctcaactcgcgccgagtcaatctggatggtctcgtcactaatgaatacgcattcggccaggctgaggacgctttcaaaaatgtcgccggtcggggtggaattaagagtgtgatctatggcccgaatgtcgaccaggaagaggcgaaagcaacggcatagtgcatgcctttgtgactgttatttttagatagaccgccgattaccctccgactccattccacgtcatatcccataaccaatacaacccaccttcaacgctatcctgagtagtgttttcaacgggttcccgagacagaccaggcatgttccaatcgtattctgctggcagctgccatacttcatgtgcctgtatgcctggctcaacaaattcgcggggttgaaggctatctccaccagtaggaattccggtggagcgatctcctggacccaaagctggaaaatatatttgttagcaagttcatcattttagctacctcggatgaatgataaagctcaccatattggacagatgttaagctattgttcaggcgatcagccctgctgaggtccggcagacgttggtctctagcaaggggattgcgagaatcccatgtcgcatctagcggcattcgaagtgtgtcttcaacagaaattaacgacggatctgccaatgtctgtaaaggctggtgacccattacttggcttgttgcggtgacgggagcaagcatggcagccgattcacgacgtaggagcatgataacaacattcttcagcacagccgtgctttgtttcgatagtgcagaccgtcttcccagcagatcttgcagacgaagaatgcgagtaatcgttcgcttcacttcctgcgcggtatcggaaagaggctccgagagagccatcacagccaaaacaatcgcggcattgaataagttgatggcaagaaatgcgcagaggtggctgtcagtggcgagctgcgctaaagccggcaattctgtcacccttgatgttcttgttgcggcattcatccatagatccggagttgtggtctggttattgggaaatccggagtcgggagataaatttgactgggccacagagggatcggtggccggatgatacatgatattatctgttctgcttccctccggtgtttgctcattcacggtgtagagatgatcaacctgccgtgctaacaaaggtcgatgcagtacaatgagaacattgtcgcaagtcagttgtagcgacagagactgcagggcgtacgccctcaagcttggtgtatcatcggggtcgaagtcacgattaaggtccagagccaaatggctcggtaggcaagatcgccatttttggaggttctcggtgacgtgcctgacaagtgcaaaatacgtgtcaccatttagctgtttggacgtcctcagagtacgtgacccgaagacggtcttgagggcaggcgacgcaatcaagtagagctggtttagctcccgctggtaggttgaatagcatatagggctggcctgaccgagggctggagaaacaaaattcgggttctcgaacacatccgctggcatatcaagattgcaatccttgtcgttgatgcccaatggccggccatatgtaattgatgcgaacctgtcccatgtgtaaatcgtccaccacactctttttctttcctcgatattctcgaaatcccctcgtagaaggccccgatgcattcctaaagactgtgccatctttatagtcgctcctaataaagaaaaggagagatttggacggccatgatagacgtgatgcgatcctaggagaatgcaggtctgggccgaggtgaccgaaggttgatccattaattccaccagatttgactcaaccaaccccaataagtccgcactcaatttcttcatgtcatcgctgttgtcggccgggtcagtgcaattcctctgagatcggtaccacgatgccattccaagcatcacggccaataacacgagaaagggtctttgagaaggatatgcagaaccatccgcgatggaatctaggctctttctgaattttggctcgtaaatggcgagagagaaccagtgtacggcatcaaaataatcttccaacagactgtacacgagctccataggaggaaacggccggctcaagatggaagatattggaatgcgttggcccgtcgccgaatttgccatagaaccaccggtgctggcctggtatccaggtatggcggatgtggtttgttcatcaatgttatggctgccaagttgacagattcttcgagcaattcctatggcggattcagcttcgccgcagttgagagacggaggcatattctcccctccagcggggaagtcagcatcatcgcccctagggtgtgcatctattaatctactttgctcggggattctttcaccgcgaccacgatcattctcatccggtgacttttcggtaagagtcaatggagatagatgagatcgatgtcgctcagttagtgggtttcttttggaacccaggcgcctgacatctgatgtaagtaaaggagagtttagaggatctcggtgtacttacttcggcagagtggccctccgtggtcgggtcgttggaagtggtcggcaatcgacgttggccctgatacacaccgagcaaggtcgaacagggtcacactagtccaggttggattcagtatacgtcctgatcaagtgggatcagggtggctctacccgagatttatggcgccgacatctttcgcaggcactccggactctggtcggcagtggcgaccggacataactgcttctatgctcgacagtgtcaacagtgaaacctccagtcatcatgaggttatactgaaggtggcatgtaggcaaaaaataagatttccaaactaaccaaatttgcgcgtgtagggtcacgcgcttgagtttatctcatccgcggatgttccacccgaggtccagggttgtgttccgttcggatataggcacaaaagtaggcaacgtaaaaagtctagatactttgttattaagaagttgtgtaggccatacataactaatcataactatattaaaggattagaaaatagcctcagcaattctcaaaaaaaaaatcaaaaagaagaggtcgtgcccgggatcgaaccgggattgctggtatcagaaaccagagtgatgaccattacactacacaacctgaattgttggaagggcagggctcaaaagcttcacaaagaaaatccttggacaaaagacaaagcttggggtttaatccaaatttagaggattccaggaagcctctaaagtattcctagccgtatatcctagataattttagggtcgggatctattgtcggtattgagggcaaatgcaaagccatttttattgaagcttcatagtgtttaataaggaatatttcctcaacaaattcggttgtgtagtgtaatggtcatcactctggtttctggtaccagcaatcccggttcgatcccgggcacgacctcttctttttgatttttttttttacatctacaaatagctgttgacgggtgagagggtgttgatacaactatgtagccctttggctggtattctctgtcatcttgtctatgatctcttaaacgccaccggtatttcccgaaagaaggtgagactgtttgagtgtgtgtttttggccagtgcaagtatggaaaaggcgtttcccgggtttcgcttacgaatgaatagaaggagatgagaaaacggaaacccatttaaggtgtaagaaacttatgtgaacttctcagattgtcactactgtgtgtttattaaatggtttttttggtatgcgtttggttctcttggatgttttcgaatatccttttggaatatataatcagccgtcaactaagtatggaattgtagaacaaacttaacaataagtttctacaattacatgtaacatacttgatggcttggtacattcatcggtctggtttcccatatataacccctctgatttccatagtaattagacgcttacatgttgaagtaatgttttaacatgtcatccacatattgtgtagaatgactggataggggatgtatgtattagatcagaatagcgtttactgggaatttgtctttccgatacacatatgagatgtcttttagtatcatcataaaataactcagtattctatctgcgcgctctatcgttaactacgaagggcatgtaagcgtcctgcgattcttacactattgccataagctccatcatgatagtgcttctcaacttcactattctaacagcccgcatctcactgcgtcaaaaacttattaggtacataacgcggcatcgaatcctcccacatgctatcagtgaggaccgttttgttcgagccatcagcatccataaccataatctggccgtaaggctggaaggtatcatcgtaagtcgcagcttcagcctggaatccccacattccagtggaccacataatgcggccatcagcagtccagacagcgtgggcatcgttagcaaacgatgtagtgagcacagtcaaatctgtcccattaggacgaataatgcacacttcataatttgagaactcgttcttcgacaggtcggtcatattgcgcgtaaacagaacccactcgccggacggcgagaagaatggcagattatcacgctctgtcgtcagagtggtggtctcgttagagtttaggtctagcaaacgcaggccgaactcaggcaggtattcgcggtacacgatcttctttccgtcgggcgagaagctggggaatcccttattggaggagttgccgaaggtgagttgctcatagctcgatccatcggacttggcccggaagatccagccgggctcatcggcgcggctttggaaccaccatcctagaccgaaggtgatccattcactatcagacgaccaggatggctggaaggacccaccttcaccgctggaaacggtggcttcgtcaagcgcgccggtttcgtaggtatcaaacgccaaggtgaatttggtgtcgcccgggggcattacggctatagaagaattgccggggctacccgtttgcttggaggtgaaggtcaattgcccatcaagagagagatcggggaagacgtccatgaagtggtaatcccactccgggtcccaggaccacagctccttttgcaatggccggatctcccagccagtcttctcgtagaccacatgtttgccgtcagcagaccaggcaggtgagcgcatacctccgagaatcttctttgcactggaagtgtagtgaataccgccgtcgtctccgcctttgagcaagtatccgatgtcagtgttcgagacatactgcgggaaaatcttgacaccggaggtattggtatgttggacaaaatcggttcctgtttcgaagtccacagaaacgatttggttggttgtggagttgacggtgaacgacgaacgcgcatcccaagttgtttgcaccgtcatctcgtagaatacaactcgcttgccatcgggggagaatctcggcgacccgtaagtgtaattcgccttgctgtacacctcgcggaagccagttcccttgggggtgatggcatagatagccagctcttgagtatgctcccagccagtgccattgtcatgaccggtccacgcggtgtttcgatcagaggaaaaaacgatccattctccatcaggcgaccaggcaggcgcaaagaatccgcttggcgactcaggcttgcccgtcacaccagtctggttggtgaggttgcgggtaacgccgatcccgaggttcttgagccaaatgttggaggtgtagacgccggccgtggaggcgtaggcagcgtacttgccattgggagatataactgccgcatcttcgaccgagggtgtggttgcgattggtgtcagaccgctgccgttcacgttgaccatatagatatcggagttgccatcgccgttacgttcagtggtgaagacgacgtgcttaccgtctggatggaaggaggcatggtattcgtagttggaggcattgcccagcaaggagcgttcatttgtgccatctgcattggcaatgtacagtttggatgaggagggattgatacggttcatcaacatgatgcctttctttcccggcacagtacgagggagcacggcatcagagcgaggcttgaggcttgcatctgctagatgcgcgtaggggcaggcggcctggcacagtgaagggcccaatagggccagaagggagaaaaagaacatgatgttctgcaccggatcgatgcttggaattccgcgagaatccagtatgttgcccagccgatcattctttatataacagccatttttgtagaatatatatagaaggccaattaaaatccaatccgggttcttcggtccgaatgtctgaattgaagatttgctgattggatatggataaactgatgacgatcgtcatgttaacggagggccacaatacggagtaactaggcaccatgtgtgtgatcgacacaaggtattgccttgaaaaagaccgagattgcaattgtttcaagaaaagcattgaagatcaacaccatgcaaggaagataagcccgagatactgatgctcggagatagccgattgagcgaatttacttagggctagacatgtaggtacgtacggagtactccgccggacattgtaaaggagctcaaacaggacgagaatgcatgagtgctgaagataagcactattattcgattgactacggagtataaattcatagagacgaatccactgaagtcgggagtcgggaccgaggcatgaagtgttttatcatgcatccttatcatcacgtgctgtcgtgtcagggacgcgttggacaactttattttcaacgatcaaagccaccagctctgacaactagatcccgatgagtttagatcgtgtcattcaggattccgacgaggacgaactctcggagggggatgacctttccacctccgccaaccccgtccacccatccgagcccgcattgcagcaggaatatcaacatgcccccgccaaaaatacgatccacaatgcagtgtatgaacatggtcctgctcctgatgaaagcataatcccggagttgagcgtcgactttgatgagttcctccaatcccaagagaagggtcagtcaatgttatcttcgtcgcagcaacggcgggaggacaaatggataccctcaactgagggtggaagtgggtcggttggtacgatgtgacagcatagtctgaagtacaaataataagaagtgatctatatactgataccgaagatgatctaggcgccatgatgacggagatcggaatcgcgcagagaagacttatggacgacgacccttcaagtgcaagcctcccttttacggccgcaccgtactcgatagaatcatttcagtccgcgccatttcctaccgtaccaggttaccacccgtatcagatatatcaaccggagaatggcagcttcacatataatccagcacccattggcgcctatgtcgatgccgcctatgtcgatgcaaatcagactttgttgcccaccagacagggtacctatgacttgaccccgcctgacaccactaatacaatggcctcgcctccgaaagtcgttccttaccacgctaccgagccttttatggaagaagagaaccctcagtcgaacccaccccagaaagcctcacaggcgaagtctcagcagactggtcccttttccccccatgacactgagcctctctcctcaattgcatcgctgaatcgcatggatgcaaatattaccactgctggaaccagtcttatttccccgcagcaatcccaatcaagcacgcatgacgagctcgctctccctgccgtcttaccaaatatgccagatgtcgggctgaccggtgtaacgaagaagcggggacgacctaagaaacaaactgggctaaataatgatgaagacgatgagctagccaactctcgagaccacgagttcaaacaccctggcgcaaatggtgcgattgacccctccgatagcgaagagaccacggaagataataccccggcctcgagtggagtctccgatgagactgacgaagaaaacttagaaacagcccctaagcctgcaaaatcaggaccaaaggagccgagaaagaagaaagctaaaaaaggcaaggcgacacctgcccctgatgccgatgacgacgtcatatgggtagacacgaagcctctcagtatggaaccttcaacaggaaatgccaccccgcaggcagaaaccccaaaggccccgagacaggatttagactccaatgttttggactcatacccccaggcaccgattcccacagcagaagagaagacacaaaacgtgcagaaagccgagaaaccagcacccaaaaaacgcggacgcaagcgaaagcagacaaccgaacaagcggaaacaccatcagagtccgcagatacacccgagccaaacaagccgccctctggagcccagactcctgcgccgaatgtgtccgtcgttgtcgataatagtcccaaacccatgccgatagctaatactgataacaacgatacatctgctactcaaagcaaggaccagaaccccagtctacttcccgatcctgaacctctccctgaaactacgattgatacccctcagcctcagactccttcgaagcgcgatacttcatctgtcaatacaccccagaacggaggaaagggcccggataagcacagtcccatctcggcgcggaatggggtgccttaccgcgtgggattgagtaagagggcgaggattgcgccgttgcttaagatggtgcggaaatagggagagtgatctgcttccttgtgatggtcatcttcaagctgtggttaggtcttggcttttttttttcattggtttggtctgttgctgctattattctgctatcattatacccctcgagagaatgttctcggcctgctttctttgttacttctttttgttttctgttggtattggtatctgcatattggtatctgcatatcttccatagttgcatgtctacatatatttcttcatttacatggaataggtgaaaggtaggataatatcctgaccaggtgtgagctgcgacgatttgtcttgagatcttctctagtctcaatatcgaaaaaattacatctatttggaggagcagagttcagcttatatgaaagcctatcattactcgagcaaaagacgaactttgtattgcaattctgatacctcttgatgattcctattccatgagctagctaaccctgccgtgtctgccgataagttcaaacgaatggtttggccacaatgaagccacagcatgtaagtataactataatctcgacaatgtaaaacccggccaaacaatcatggcaatccaatccaaagatcaaaatgattcatcacatccacatcgcaacgatcaaagcaaggaacaacgatgttgcagccgcggtgccaatggttcggaaatcagaatcagcttccgacttgtgacccttggtttggactttcgggtcccaggcatcgccattgtaaggagcctcaacggaacaatatccggcatccttttgacagccgcttccacaatgactggtggtgttgccacaagagctagtactaccacagcaaaagccataggtagatccaaggcaagtgtagttggaaccacaggacccgtcccaagagatcggcttgttgggatctgccgaagcagtattcttgggcttcttcttctgagtgggcatccggctatccttgcggtaccagagtggcctgggatcacggagacagtcgccgacggtaatggcacgatagccttgccgcttgatgcccttgagcatgtgctctgtgaggttgtggacggtctgttcatgggcgtcatgggcaatgacaagccatgatttggtgcgtgggtcgctgttcaaaagctggtgatcaaagatatccttagaccgttgaatcagatctggactgtcatttttatagtcatccgtgtcaatgtcatacaaaatgatgtggtatccaagctcgcccagctcatttccgcactctgtgtcagggctgcagctggaataaggcggccgcatgtaagtggggaaagatccgagaatgttgcgcagcgcagcttcgttcttctcaatttgctcattgcgttgcgaaggagtgatcttactgaggtcctcatgcgaccatgtatgactggcaatctggtggccactcgagtgcatgcgttcaatcaatgaagcccatggcaaggtgaggtcatcgatagagccctttccgttgttgatcccagtgatgaagaatgtcgccttcgcatcgtatttgtcaagcaaatcgagcagatcgccagtgtaacgtgtcgggccatcgtcgaaggtcaatgcaacagttccggggatagcgcatgaacgaatctcgcgagggccgtacggaacttggccgacgtgaggacgggggatttccttggttgggggtccagaaggcgatcggtgagcgtcacatttaccgtagtcaagcttgcagtctggagagcgacagtgcgccttcgacgtgccgcagaaacctatcgtagaatgacatcagtaaggtgctcaagctaacaggattttgagaacatacctgcacccgagcagcatgtaccgaccggacatttgccgatcttggggccacagcgatagtccaaattgttgggggcatcacgagtgtccaaatgagactcggtttctggttgaggttgttcaattgcaaccgtatgcacaggaccgacatgcaatttagcaaatacacacgttgccaaagtggcgacccagatgggttgaatacgcatcttgagaatggtatatagggttaatctatgttcaactgggtatgtgagatgcaatgggttgggatgatagcaacaggtgattcggagtgagaggagaagagagaagaggccagcaggatgggggaaaagcaatggagctaatttctacaagaggaaggaggacaaagaaggaaagagcgaagcttcgaggcatttttctacttaaatcacaaaacgcaggagcaagtatcgtggcaagagctcctaaccttgacaaagaggtgtagaagtagagattgacggcgcttgtattcaatatgaacgtgggtatcgtgaaatccatagccgtctggggcattggaaggttgatctgggagcccagtacattttccggatttagcaaccaaagcctagtgggtgcgatcaatatggtcatgatgtgactacatatagccaattaagatcagacgcagcacatcgggctcctgtagcagcccttagcatcatgcgtaagggtctaggcttcagtgtcggtcagacatctatcatagggcaatagttatgacaaatcaatttgcccgggtaatgttatcttctccgactgccgagaagacaaaaggaacaagggtatccaggtgtgggccaaacttcccaggtgcggtttttgcaatggcgccaattgcagcgatcaagtgccgacgctgcaccacagaaatctcggaagacaatgttttcgtcagatcggacacaaattcgttgagctggttgtcggagaagtagagcacaagcgccgagatggctgtcagggcgcgtttagtgacaacagttccagccgtgtcgttttggatgatggccatgacggatgcctggagggaagcaagctccgaatcttggagcagaggcccaaagcaggtcacgaccttgatgagcacatcgatggcatcactactgaagccccgtgatggatccttctccatcatgcctctcaccactgagctccgccgtcctgtgattgagagagtcggtccagtcaaacggggaaccaagacctccgaaactgctgtgtatgcaataatcgaattttgagatggaggctggcccgactggggacgagggagcgtatcgacgatgacgcgaagagcagtgttggggaccgatgtgtctatcgtctgggaggcagtcaaattggccaactgctcgagaagaggtgtaagggattcgagtggtaagcgaactgcgagaggaccgagactgggttcgagttagatatcagcaggatcggagggcaatagagctcgaataccatttgagggcctggttctgcacgtcgccgtgttgatcatccaaggccttgagcagacctcctgcgagttttgttgcagtaccacggtcgtgggagaggaataaagaatttgggttggtcaggattccatatagatcgttcaaggacatgtatctcaagtccgcatcggggtcatcaagcttcgctagcagggcgaaaattgtctgctgggtaacctggcggtccgccatattgacgaagctatgactgttatcggtaaatgaggttgagagaaagcctagccaaggtgacgagtgaagcagtggatagtgaaagcaccggggagagcttgcggtagcctttgatagacgccgcaacgtgggggtgtttccgcctaaggtgtcattattatggcctgaggcatgattgcaactcagtgacaacctccgaaaatgtcaactttgaacataaaatatcggttagatcttcgaatatggcccctacatagtcattttattaaggaaggtgacattgaatacttggatttctccaattatcggatctgatactcagtcgagatgcacgtgatgacgaacaccgtccaagctccaagaatggtcgttctattgataccccgtgaactataccgaggtaataaaagttgtacctgcaaggtcctctgaaagtaccagctaccgtctaaaaccaccaaaaccaacgtattcgtcaagtaccaagtacctggcccaaccatgccaattacatcacgacgcacagaccatctcggaaacaactaggatgcggtcttacgacaccgagaggtcgacttgcgaaaaccgggaagctttggtgttctagtgctgacttggcgttgtgctttgtgctctttgtgctccaatctactttgtacctaaacaatccattttcaacctatcaccctttccacgttctccatcaattctactctgtttgtacccaggttgctactacacaatggtctttgcgcgccgttcaatcttccgcgctgcgactgcagctcagtccttccgtgtcggctctgttagtcgccggtctgcccagctccttggtcgacgattcaagtatactagcaacagctatgagccagggccttcatccagtaacttgccttggtaagttatgttcttccaagaaatcttattcggtcttctaactacttctgattgtaggttggtggcctctactgctgtgactgttccaatgatctatttcctctggccttctggctcgaagggacatcacgacactcacggggacgaacataaagaggaacacacggaggatcacggcgaggtagaggaagcttccgaggaaaaacctaccgaaggatcctctgagccggcgcccaagaaggaggaaaagacggacgccgaggagaaaggcgaagagaaggcggataaaaatgaagagcccgaagaaaagaaggaagaacccaaggatgagaagagcgagtccaaggaggaagacaaggaggagaaaaagcccgaggaggagaaaaaggaggagaagcccaatgatgatgactctaagaaggaaaataaggacgaaaagaaagacgaatccaaggaggacgagcctaagcaggatgagtccgaggatgctggaaagggcgagaacaatgatggcgaggcaaagaactgaagacgccttactcccttgagcggctgtagagccaagcctgtgtatgatatttcaacatgttaatgttcgattctttgtcccatactattcgtgtacctgtacctctactatatatgagatatagataccagtcatgttagcgtgctgaagaacgatagttcattggtctattctgctagtccggtctaatcttagtagtcaatagttggccgcttatacgacctctatacttgatgatatagggttggataatcccaatatagattgtttcaagatgatatcatgaacattataattgcaattatattacgatgcctttttaatacatttagagatatctttctaggtgccttctaggataatctgtcgtaaaccagaatatgtcgtctgccgtactcttgttgctcttttgaaatgtcaataataagcgcacgtcttaaaacacaaaggaagaagaagaaatatcatcatattgatctaaaagatgaaccaaagaaaaaatagggaagcaaaccaccacgtgacacctaaagcccttccctagcagtgtttgacaatcgctcacagtatacttaggatcgtgatatcacatcttgattcttaagcttttctaaatttactagtattttgtaagttcacttagacgttacctagaagttacttagacgttacttagatgtggctaagacgttacctaggcgttacttaggcgttagccgcgctacttagaagttacttagacgttactaaggcgttactaggtaagagaaataaaagtattttgtcaaaaaatctccatgaaagacttttagttgggccgtggtagccctgagtgtaccacctagcttcaggacaccttagcaagggccgggtattcaataaaacccacggcgttcaaagaaatgcctcaatgagagtccatcgggccttcgcataacatccacccagctcaaatcctcctttccttcctcccgagtctcatcaatgagattccaaatgtcctggacggcagtccactgtgccgtgacatttggaaggtcatattgctgcaacgaacgccacaaggatgcccacaactggcagtccttgctgttgcaggctcccacaaaagcagggaaggtgacgggtggatctctgtgcatcacctcgagtgccaccagtgccttgagctcttcggcatggagcaggcacatcaagatggcatccacagggatggaagtgtcgtccacgaagatgtggttgattcgattgtggaagtaaaggcacgccgagagataccaagccacttcgaggttgttggagattatttgttgtaccttcatgccgggaccaaggaaaattgggatgttatcatcaggtcgaaaggtttgtagatgggaagtcaaacaatttatgtcttcaatgaggtgctctggtaagatatgaccgtccatgttatgttcttcgattgtttctgccaagtcttcgattttcttgatggctagctcggtaaagtgtgtgatataatttagcacaccaaatggtaagcggagtggcatagtgactacttggagtagtggtcacaggataaacaaggtggaaatgatagattgaatggtatgtcaaatgtgataggcaattggtcgtgactgtggtactcagcaaagaagggaagatgagagtcaacgaggaagggaagaatactcggagaaatcttctgatataaacacaaattgtagctactattcgtatattgacaagacgctattggcattgatgcctagacgatgcgatgtgattaacaaggcaatattaccttcgtatatgcaggcatcgaagtaggcagttgatatagtttgtagaaggtacaaaggagaataggaaagaatgagcttgttaacgacaatagtagcttattgccaatgtattttgatgcagtgaatatggaatctatatgcattatattcttcactgaagaaccagggaactggtaaatatgcagtttgtgacgagctgtctataagtgaataagtttggttatactctcgattcattgctagaaattctatcatccgaagatcttggtaagacttcgtataagatcctagtataagaccaaagcaatagcacctgaggtccgaagaagacgatataagcgagaaacgtggaagctctatctcgttggaaacaagaacccagttcagtcgtgtttctctcgcactaccttggagcttcaacatgaagttcgactccctcgaaacaccgagaaagggttgatatccgcttttcgacatcgcgctggttgtttcatcactgtgcttggtattgtctcatgccggattcatccaggccataaaggtaataatcccctctaccttggatgatgttcattactcatgatatccggcttgcgaatgttggttgtggagaaggaaaaaatcaagtctatctgatatcatatcgctgggagtattcttttcaaaaagaaaacaggaccaggcttaattgcttacaataaatatggttggttgtaagtccctttgtttcatatttgcttcataaatgacatccatggactcaaaaagtatgttaaaaaaacacaaatgatgtacatgaatgacaatagaacatcaagagacagaaaatgtagtaaaaattatttaattcatatgctcgtcaaaacaagtgccggcgcccgctcttctagagggctatctcacaggcactgccaatgtaccgggctcagacccagctccaacaaatacataacagcatatcaacatccagaggatcagctggagacacacttgatccaatgcataactataaaactgtgaaagtccccaactttgatgtcgggtaattgtttgaatgctgatcgattaaatgataatcgatcaaacttcagggaaagtgctagacttatgcctttctgctgcgagtccgaggaccacgctgttcagtgacaggctcgccgttgagcagaacctgaggagcgtggttctccttgccagtctggtctgcgccactggcaattgccttggtcgcattgacagactctagcgcttcctcttcctcttcgtcctcgctacgctcgtcttttgcgacattggtgaagatgtagtttgacaagatgcgcaggatcaggaacagccagaacaggttgacagcctgcaaactggcgagcagcgaaaaggtgatgtactgactgatccagcacttgtactgctgtgtctcccagtttagctcgaagggtccaacagtgcggaactcggtcagaacagcccagaggatcttcaggttcagcacatgacgcaggtaaatccaccatccaacgaacatggcaaagtatggcgcggtgatatacgcatccagataattgagcgtcttggaggtggccaaaaagaagtcggagatatcgtgcgtgatatacaccgccaagcccatgtacgtgaagtggaagcggtagctcagcgcaataagcgcaagcgtgataatatggtgaccaacaagctccttgaagtccttgcggggcttctccaactgcagcagcaatacaatcgcctgctgagcccaataactcgcctcgagcaggtagtacgccttgaacagaccctcgtgctcgcggtgcgggaagccctcaaacatcgccgtcgtattgaagtaccagatagtcgagcgcttcatcacgtacagaccaaacggcccgaatacaccaaagtacacggccgtatacgcttgctccatgaaccgagccgttttccccttcccacggataccacaccacaccgcaaaggggcggatcatctgctgcataataaattcgcgcgtgaacgacagcacgatcgtgtagaacgccacgaacgcaatatcctttttgcctttgccatacatgatgggtccaccgggagtcttggggggctgcgggtaggacaagaagatcgcgctgtgcatcgggttcgaggttgtggggttaagcgcgtacaacccgagcaggaacagcatcacgataagcggcaggagccatgtgtatcgcagacaggtatccgcgaagcggtggaggagggagcgactgcgacgtcgtttggtctgcgccttgctggcctgtttgtgtgcgacatcgaattgctggtgggattacgggttagtgaggggatttgggtgggcgggcaatgactttcaatacgtaccttcagaaatggcgatgatggctcgataggactcacttcgttcatcgtggacatcgctggcgcactagtgtcaccccgaatgtccacgcccaaggctgatgttcgccgggggcgaaccatggcgaataggaaactcgagcttcctacccttttggactcggagggttcgagctcacgtgctccaatggaaagaggtggatgaagggaatgagaagagagactcgagactcataaccaggacgatcgggtgaagaagattgtgaaaggtgactatccattttttttttccagggggtgaagaactccacccccgttgaccagacagcttcgcagctccgatcggaaagtcttggcatcttcatttcctttgatgcgcctttttgggatgcagcaactagcttctcggaaacccctatatacatcccgggctggtttggaattcgcctaggactgccaatcaaatggccaatacttgcgagactcccacggaacttgcgagacgaccgcggacagcgacatatcctatttgggaccccgacgtgtttacgatcccacagtcccgaatacgagcatattgaagctggataaaaatgttgggattcgttgatatatgcacggattgtggatttatgcagttgttgaattgtataacatgacatcatatcgacatgaacatgtctaacccaaaagagaagcaaaacaataatacagcggagccatctaacaacctcgtctatacacgctcaacttctatgcgtcgacaacctcagcgtgagtggcagcgcgcttgtcagcaccagccagtttttcaccaaggatctcaatatcacccgactcggcagccatagtgcgcttggtatcgtgggtagtcttccaggccggggtaccgatataagggataccgttgggatcctcaaagatctgctcgatttcctctagagtcttaccagaagtctcagggaacaagaagaagacgtgaatggtcatggcgaacaagaaaacaccgaaaatgatgtacgtctgccagcggatcgtggcaaaagcagtgggcacgaacagaccaagcgccgtgttgaacgcccagttgaacgaggtagccaaagcaacggctttaccacgcacacgtagagggtacagctctgaagggtacacccacgatacgggaccccaggtcggagcgtacgaagccacgaacaggtatgtgcaggcaattagtcccttggcaggggcgccactcagaagcattgatgcctccgccacgccgtcaataccgccggggacaatcacgccgtacttggccatgatacccgcgttggcaaacatccagatcatcatgaaaacagcgccgatcaggagagtgggacgacggccccagcggtcaacccagatcaaggcgggcatggtcatgaccacgttgatgatgtactggatggaggaagcgaggagggtggcatcacccttgtacccggccatggtgaaaacatacgtgatgtagtacatcatgacgttcataccggtcagctgggaccagatttgcgtccagattccagtcatggtgcggtggatcatcctgggctcgaacaactcgaggtagctaacgtccttgttctcgcgctcgaactcgcaaatgtcgcggatctcttgcatctcggctagaacgaaggggctgttcatgtcgcccttgccgtggaccagggtcagcaccgcctgacactcgtcccagcggtccttgcgggccaaccaacgaggggactcgggcaagaccatcattccgaagaagaggagaacagcgggaactgcctgtacaccccatgggatacggaagacggactcgctgtagttgtgggaggtggagctgttgccatgtccgatgaatgagcaaccgaaggagatactgtggaacaagagtcagctactgagtcacttttcgaatctcaaaccaggtgttaccacatactagtacatgatcaggataccccaggtgatggcccactgctgagagccgacgagacgaccacgcttggagggaggagaaagctccgagatatagacaggaacctgggcggactcaattccgacgctgagaccgttgatgactcgtccggcaatgagcatacccatgttctgggaagcgcatacgatgacggagccgataaccctaacaggatgttaaccacaacagctcaatggcaactccaccctaaccatgaccacttaccaaagaacacaaccaaccatgatagcatacttgcgaccaagacgatccgaaatgaaaccagagataagagcaccgagccaagagccaccgggcatggcagcggtaacaccaccttgagccagggtgctaagaccactacatacatcgtcgtcgttgaatggagggccccgaggcccatgattgaaataacacttataagccggcgtcccgataatggccgacatggacgagatatcgaaaccgaacagtgcaccgccaatgacggacaccgccgtgatggcgtagagattccccacgacaaacatggtgactgttagacccaagccaggggagaatgatggcaaaagaagagagaaagtacaagaaaccgaaaaaggatgaggaaaaacctccctgcttaaatagatcgcatgccggcaaaatgccctacagtaagaaatacatgactagtcaaatccacccgcatataggcattgttttcgttctgttttcttccagcatccccactccctatcccgtgtatggatcgtccacggagagggattattgtaaaacatgtgatcatctgtagataataacaataataaaaagggagagttacaacaagactatgccaagactccgcttgcaaccccagctaccaaaacgaactttaattggcggaagccggattatgcttatccacccgctccatgatgattggtggactaccccggcaaagactgggatccggggaatcgggccacgagctcacaaaattcctaagccgaagaaggccaagcgcggtaattgagaagttccccgaatccggaagccgtgttcgggcgagaaaagagtcggctgattccccttggacggcagtggcgtttctgggcagtacttaattattactagaaaataaaaataaagacactcttctggaaatgaggttctttaggaagtgtggattcattcaaaacagggtgtacgattttccgatatccccagacccaacccgcatttccctgtcaagaaacaggtcaacgcaacacgtaccaggtaattttactgtattatcttcgcaatttagccggagtgcccacatagctacgtaagaaacgaatgagaagaacatcacttcaaccggtgacgctcaccatcttaagtccggggccccgtctacggccatctttccagaatgggacagtacgcggcttctcgttaacttcagtggctgccgctcgccgaggtggagtcggcttgaactcggcctgcggtggtttttttccttttctggactgatgttggcaattgttgtgcctagttcgcccgctgcgaagtttgattgtgttcggggcttcggactacctggtattgtcacttgctattgggatggagtggaatatgaatgcccacgttgttacgtagatgatcatctagatcctcaaatccattcgtatatcttatgtgatgttccccgcgtggaaagatgcggagggctgggggaatccgaaatcctaattgcgctcaccaagactagcgtggatgatctctcatatgttctggcttttgctcttattttcaagccactgacatcaatggtgcaggccgttgcctttcttcccccttgatattgcacgggccatggtaatctagttaaagtctcatccaagaacggccatgtccaacgtacgctagatatattgactggcaccacaccttttgaacttgccagaatgacttctaccatcaggtccgcgccagagttggtgatatagcatgctacttcacctgaaatcgagtctcgttgagggtaagaacaacatcgcattggaaatacataaagataactgcttgtggtagatcatttgacaaaatacaaaaccatttctggaaagagtttccccgctctcaacacccgacaattaatatacatcactcgggacctcattatagacacgaacccgacttcgatcaacatcaccagctcctatacagaggaacacgcggctctcaacctcgttagacgttgcgatcagagagcacgctgatccactttcaccccggtagaacttcaattgttctccgggttctgaggatcatatttccaacggcggtggttctccgaaacccaccacttggccacatgggccgcctcgctgagccacttcacagcctcgggtccatgctgcttccgcacggcgtcgaccaagaacaggagttggtgatcttcctggggtttgagctcgaatgggtcggcgacgacatcggtgaatcgccacttagcttcgggcttgaggggcacgatcagacggtacggctgtgcggccgctcgcatggtgaaccacgttccaccagggttcattgtggagaaatgccattcttgcttgccattgtgctcggggatgagtgcgcgtatcatcgactggccctcgtacatcggaagtaggtctttgatgatcttattagactgcttatcaatagaggaggtttcgacgagaagatcgagaatcgtggggagaatttgggtagagaggacagcagttttgacttcgatctggggcagcttagggtgagagaagaatagcggcacgtggaaattgccgacgtgaggggaatgccaggcggtgataccgccgtcatttggaagtgataggccgctaaatcaagtcagaggctgaatggactgcgagttataggtagaacttactggtcaccagtcatcactagaagggtctcatcggcaatgccggcatcatcaagaagcttcaggatctcggcgacccactcatcctggtaggctatagtattgaggtatcggttcaacctctcattctgttcagtcgacacatcccccagcatctccttataatcaccagggatataatacggagtatgtgtattatgtgttaaatggctgagaaagaggcgggtgttgttcttcttggcatcgtcgatgacatcccggagataatttttcaatagcttatcctcatggccatgttcctcttcctctgctgtttcttctgggatatatttacgaccacctgcgtcgattgttcgctttgccatgatatccttgtaccctagagcaggatgaagcatataatgcttatcccagtcgtcagggtgtgactgcatccacatagtatgccacggccaagaagtccagtcatctgcctcgccagtggtgtttggctggtggtttatcgcatcgagtatgtgcggcaagcaaggctggtaaatatcgtgcaggtactcgaggttggcctcaacagccatgggattcactccgcacacagtgcccgtaatactctttaaagtataggtcccggaagtgtaagcgttgcttgcactgatgccaccatacggcttcggaagatcatccccatccttatggaacccggtcccaaacccggtcaagcgctcggcggtaggggtgagcttagtgagcctctcctggacgtccttggggatgccgtctgggtaagattcattgacgtgcttcatgatgtaagagtttgagcggaagggccacacatcctgtcgagtgctctctagcttaatgagaatgacatgtttaatcttcacacttccgttgtggagaagttcacgtataggctccaaaatatcgttctggaggtttggcgtgtgtagaggatccttcaacggattgtagtgttcatacacatagtcggccttgttgtgtttattgatgcggaagggagaccaatccgggaagccatctgacgaattgtatgaaggtaaccagtcaaatgtggggaaggagtccagagcagtgtggccctccagccagctgaaatcggccggtaacaaggtgacattttcataggtggcatttccattagcaggaattttaggggcgctttctggaacacttgctgggactttttctggagcctttcctgctggggtactttctggggtattttctggggcacttgtaggaggggcaattgcaggaggggcacttccattcgctggcgttggagtttcatgagcgggcgaatatctgtggctgctgaacggcgcaagagacagggagccagagagatagccgtagtccgcaccgcgtggacgaatgcaactgaggagaactaggattaagccgcacgatatgacgatcacgcgcttcagcaacgaccgcgtcggcttctgctcgggttgacgaggtgcatccaattgtgatacggagtcgctgtcgttgtgaccctcatcatagtcatcgatttcaatctgctgataggtctctggatcggacaatggctttcgtggaagacaccggcggaaagggaatagcaaaaacgaaccccaaatctccaggaaagtttcggtggcttggaagagatacggcgtagcgaagtacgcaacgatcataatcaacgtgtcgacgaagataccgacagtcaacatggacaggacagtctgggtagccgtattgggattttcctcctgggaactttccgacttcccccagtgaatctccgcacctgtatgtacatagaaggagatgttggcggaagttacggaggagatatatagactgagatgcgattagcaattgaatgttgcttacgagtcccggacgacagcttacctgaataaaagagttacaattgcagctacgttctgccaaacccgcgattcaaacgaccgggtcaggtagcacgcgaccagaatgagcaggatgtccaccaggaagaaggtggggccccacggaatgagtgatggaaccgcgagcgacgtgagatggacgcagagatggaagcattttgacaggatgagggagatgaaagtaattgagaagaaatatgtgcgagacgcgtccaggtagagctggggggatctggccactttgagggcgaagatggccgaatcctcgagttgccgacggagctgggagagatctccgggacgattccatgaagatttcatgccagcaacagcaccctctgaagggaagacaggctagaaattgaggacggatacataagccgacaaggaagagagagagacaagttaaaaaaaaactggacactgaaaatccaggggtccaaccatagggcggggcacgggttcatgcactttacggagcaacgcccgggctcttcctgacggttcttggcgcaaatgtgaccacgtgcggaattaccgggataggcaagggggagagcaaacagtgcaaatagaacaaagtcagcaaacactatcgactgcacttgtaatctcgacctcattttcaactgggaaatgtcctaggtctaattaagttacatgcaactattgttgattggtggtgaggagattacatgtcttggtcttatttcgcttagcagggtctagacagaatagatgctccgtacaatcgaacacgtatgttagttgtaggggccaaagcgaatggcacgcttactgtctctggctaattaaggggtgagaactaagacagaaaaggaaagccgaaatctgacaggcttacggtacaacatatgtgacatttctgttgtatgtcgccacttctctatggttgtaatctaggggttccttccaaagttgggatcatccggacgaaccttcgaagctctaactacatgcagttaagctgtttcaaaccaggttatgtcagtccaaatgaggcgagctgattggcaaccccctctttcagccttattgggccgatcgacattgaactatgcttggcacacatagaaccggggaatcaacaaaaaagccgattcaatatatcttccatcaagccatcttacagagatgtggatcgctcaattgttaactggatttggcggatgcttatgactacggtatttctgtggaaatatatatgtacactcatacccgcccaagattgagtgacactctatatatagttctagacatcacgatgacatcactagaataccaccagaaggaggaacagtcggtgagttgtattgcactcgttgacgtatcttagatctcttgcctatgatacactaaaccgaaggtcacagatgatggtgtactcgctggtacaatgccctaaacgagcgggtcaactccgctcagcgaaaccagggtccaggacccaaccgagattgcgctttcatgcatatatgtatctccctatagtagcgagaaagagaagtcagccgtcacattggaaggcccttttctgtctgatccagacagctagctgcacgtggtacttgctgatatgatccatatgtgatcgaccttcattatcttctttgcctgctgaaatcgtattgagcaatctccactacgatttcaggcttcctgtatttacgagttgattggcttaaatagacttgagtcattagtgaaggacgtgaaggacatgtcgatgagctcttcaggtacaggccaggtcgcttttccctactttttcggccaagttgtgatatcatgttaacaagactacctaggtaggtacatatgaatgtatgtatgcattcatctagatcatcgcaggaagagtatcgcatttgcatcatcatcagagtatcccccatcgacgttagagacatcaactgcccttcccctacctagaccataggtcccgtggctgcacagtacaaagtccgaccgcttctcttcttgaaagcgtcctttctctccacttctgaaacttaggaacattaaagttcggataccgatcgtacatctcattggggacctctgccaattgatccgcaagatcaaaagcagtctccaaccgtccattcagaagcagggtgatggtaccaatgctctcatatagtgacccataatcttcaactccgtagcccactttagttataaatgccaaccaaagtctcattgcagacaaaggccactgtggacgtgttttgtacttcagaacctcatccatctgttcatcgtcccacctggggttgccacaacgattggcctcccaatcttcataactcatgtgaccagggggaaatgatagttccgtctccgctgagtgaaagtcgaggacgagggtttcagcgatgattccacggtcatctttcctacccactggtccatatgtcaagaatcggtccaagtagcggtaaaaacagtgattgagagagaaggtagcgctttcagaacaaagcgcatctttactggtgacgatgcgtccaaagaagcgcatgtctatgtgcagcgtagagagacgggtcgtaagccgtgggactgaaatccaggttgaaaacatatacatttcatttagaaccgaaaggtcaagaatgtaggtggtttccttcattcgattgaggacctattgggtttccaccgaaacttgacgatttgtcaggagcagagagagacagttcgaggggagatccatcaaggaaggcatgattgttgatcgggcctcaagatgtttgaagaagttggcaagtactgagtttggaagctgaatgggtgctatttatgtcattatataagcctttgtctaggtaacctttgtttgccagtcgctttcaggcaacggggcactttaggaaggcacgtgggttggaggtataaaagggcctccttccccccaactcttcttcttctcttcttctctcctccacacctctctcaaccaccatctctccgtagccccatgagacagcgtcggcagagggtgccgtagcacatgctgcttcacctaccacagggaccatgacattaccatatgtatgaggtccatgtaggtctgcatnnnnnnnnnnnnnnnnnnnnnnnnnnnnnnnnnnnnnnnnnnnnnnnnnnnnnnnnnnnnnnnnnnnnnnnnnnnnnnnnnnnnnnnnnnnnnnnnnnnnnnnnnnnnnnnnnnnnnnnnnnnnnnnnnnnnnnnnnnnnnnnnnnnnnnnnnnnnnnnnnnnnnnnnnnnnnnnnnnnnnnnnnnnnnnnnnnnnnnnnnnnnnnnnnnnnnnnnnnnnnnnnnnnnnnnnnnnnnnnnnnnnnnnnnnnnnnnnnnnnnnnnnnnnnnnnnnnnnnnnntgaagtcgtggctctcattgccacttgacgagtcccacggaatacatgaggggtgtaagtctccatagccgaagacttgtaggtttgagtcatatgcctaggctagagtaacaagctgtcccttgattcgagctagaggatgacatggagaaaagcgaaagcaacatccaaaaacttgagagcatgatgtcttcccttccaatctcatggtgactgaaacttcttatttgtttatccaacaccaaacaccgtttgtacagcagagttccaaaagacaaactttatattaatattaagcacccgccaaggacgagaaatctacctaaccagctcccactcagcaacataagcccaacccataccaacacggccaaccttctcctgaaactcctgcgccgtaacaccactagcatccttccgatccccaaagctagtcaacacagccaactgcagcttctgaccaggtgcaccgagcatacgcgcactaggaacatccacataccagaactcaccaccgcccgcgggtccggagcctggtacatgcgtgaaagggagtttgtcgtcctcgcgcccgtccacgccatgaatcataagcaggaacaagcccgcatgctggatgtggctgtggcgagcgagggtccagtgcggacagagaagaccgaactggaagcgcattgcgccaggcgtgctgatggagatgtgcaggccttgtgggtggaaggtcttccggccaatggtgcgcttgtcggcgtcgctgtagacctgtagggcttggacgccatttggtcgttccgggtctgtgagaatatactcttcccaggttatatccgggcgtccgtcctcgcggaaaaactggcgtttgtttgatgggaagtgctttaggccgaactcttcgttcggcattgtgaacatcgacggttcgaatcgttgcttgtatggctgcccggcgccatctattgctcctgcaccccagcaggagtcgattagtttccatcggcctccatcgattttgacggcgttccaggcgtggttgccttcgaatggtggcaccggggcccctggagcaagtgcgttgtgtccgaagcctttgccgtgaccgccgactacgattgcctctaggccggcgtgggtggctaatgctgcaaatagtcccgcgtagccttcgcagactgccagtccagatgcgagggtactggctggcgtggaggacttcacgcaattgttaaagaaggcataggtatcgtaggcaatgttatgatgcaaccacgtaaatatcgcgcgtgccttatctgtcaaggatgggaacggcgctgtcagctcattggccagccacgtcatatcctgcgtgggaagcgatgcacgaggataccgggccgcatggttatcaggacctgagaagtcccggcataccatgcattccgtgtctgaggtgggaggtggagggcttggagacacagccgagccattcaaacgtggctttgaagccataattttggataaatccggacgagagccatgtggaatcggtggtggtgttccattgggggcagctgtgctggatttgggattaccaaacccgagctgcctaggatcctttctttgcgcaggcattggtggaggaggcaatgtcttccggataggtagattaacacttgagtcatcaccagttccatttgtgtctgtgggtaccgcggatggccgacgtgatggcagtcgaggcaccgggggttgctcatcctcataacgtggaggtgactggttaggatttggagaggaagtaggacgaggaggttgagtcggctgcgcaggctgacttggaatagagggaacgggcggtttggaccccggtagcgatattttggaggtcagtcgagcagacaggctcccaaagctcctcttactactaatcgtaggccgcggggccggttccaagctaacttgctcttttggtctgcgggcaggcaacgcaggcagctcggtctcaccccatgcgggcgccttgatgcgattgttcccagtagagttcaccgaagttgtcgatgtgcctcgccccgtagttgtagttgtagctgtcgacgttgtcgaatgtgacgcatcggaagtggctgactcaagggatggccggcgcttttggtccgttggcctacgcggtggcagcggaggacgggctggtgtagggggaggcaggcgatctgaccttcgcgtgggcaatggtgggggggcttttggctttggtttcacttgaggccggagagtttccattggaggcggtcgcaggaccggcctctgagttctgttatctgcgggttcatttccgacagatgttcgatccacgacagagccgactgcatcgtatgagggagggttgttgacggacgcgctccgttcggtcgggcggaatgatggtccaggtcctcccggtgggcgggccagttgcgactggttaagggcggcgatccgttgctggatagaattcaactgaggatcttcggccatggtgcctgagcataatgatattgaagagaaagttgagacgtccgctcgagcttaggtacctcgttcttggcttggcgggggcgaaaatagccttgtcggactctgaaacacgactgcgaattattactgacaaggatagtaggccggttatgcggcttgtcatgtcatttcgtagtcatttcaatagtcatttcataggcttcttggattgtatttttagatgtcttctttaggtatcttctcccgcttcttaagttttgggtagacggcgggaaaaggcggggaaagatttaatttgtgcagatgaacttctttgtataaccttagataatttgattcaactagagtccccgagagaaacacggcgaaagacaatacaagaaagaaaggaattaaacaacaggaggctcaactaaagaggggtcagccctggggcctacccatgggtccggatctatatttggaaattcaagttacggatctacaacatacacagtaaaaacccgatgaattataagttgcaagcagaagatgtttgaatttatttccagaatatcatgattcggagtcccaaacgccttgaaccggtgaagccctcaaaaaaaataaggaaactaggtacgtgcagatggatgaaggaagaagatgaagcaaagaaaatgacaaggagaagggtagcagttaaagaataagaagcctcgagatctccaattgacagcatgcaacccgccagaagaacccgaggccgtgatacagacataagaaaagtcacgtacatcgttggagaaaagaaagggaaattcacaaagtggtaaagccgtgggggtagagggccagcgtcgatcatcagcagcgtcacttcgtcccaatgtacatcatcgtcagggcaaacttagacattcttgtagaggagcaggggctcgccaacattctcgatctccggaatggtacactttagatcgaatgccttggctagaacgatcttgaagatctgcagtgggtcagtatgtgttctatcagacttggaataaaccgagcaacagggtgtggacggctgcaacttaccttttgcacattgatgctatggctggtgctgctaaatatcagactagccttcatagccttggcaaatcgcttggcctgcaaatatgttagtaatcgcggaaaaaaaaacgaggatcacacgtacctggatagatatctcctcctgatcctcacggggaaagttcacaaagtgatcatacttggtgcccaccaggaaggggatggctgtcttattgaagccacgtccctggcgataccactccttaatcgaattcaatgtactcttgcgagtgagatcaaacatgaaaagaattgcaacagcgtcattgcagacaagcggtagcatattaacgaactcgcgctggccaccaagatcccaaatcgagaaggtgatttcagtgtttcgaattgagattgtcttttccataaagttgacgccttcacaagtccttggttagtaaacagagctactgtagaacagaaattcaacttacctaacgtctggatgtaatcctcgtcccagctgccctcgacgtacttgaccatcaaactagtctttccgatctgcgcatcgcccaccataccaaccttaatcaccacactgttcttgttagcctgcgaggcttggcgctgaccggcgtcttggtgctgcagctgggaaacaggggcccgttctggaccactagagagtccagatcctggcctggagttgggaacaggtagagggtggtggctgagcaatggagatgagccctggcgggactgatcagtatcttgggcggcgtattcgggagcagattgatgaaagtcggtcgatcgggagtggtaatgcgccttcgaatcgctgttatagccattgttgatggccgcacggctaatggtgtggtcggaagccggctcttcggtattggccgagataggcgcaggctgttccagaggttggtctaaaggttgttcaaggggctgttcgggcgcaagctcctggccctcctgcgcctgttctgtctgatcctccggagcaatctgctcggattccgcaacgacaggaacagcgggcgcatccaccccaggagcaccaagagggtccaaattaggctccatgacgtttcaagatcggtttcggtgtagaattcagagaagcaacctgccaacaagttctgactgtcagcatatacgcgcggggtgaagaagctcaagaggggactaaccaatatcacaacgggctgaaattccagcgcaatctaacgagattgcatgtgtactgcctcaggggattgattttgagaaaattgaagaggccgagctgtgttggttctcgggggggtcagcggacaagggttgtccctgagtaaacagaccgaattgggaggggtgacggaaatgcgagtcaaagcaaacaaacgcaggaaccaggctggaaataaacgtcaaatatttgactccttcgaaactgcggggcctaggcactaaataagaacgtcaaggctctctctggtgtaccttcagctcgagggtgggcaactgggatcttacgctaggccacgataggtttagcgccgctcccacgctgttgccaaaatttacgggaaaaaaaaagttcttatcgcacatccccctcctcggtctcgacacccttataattaacactttttacgggttcaagatgtccaagagaagcgctgaagcggacgagcacactgccgccctcaaggctggcgagcggccaattgcagatgccccaatggacgaggcgggggagttcgaagacgagtacgaggatgaatttgagagtgaagatgagattctagaggccggagtggatggtcgcccagatgctgagcgcgaggaggaagagaagggtgcgcattcttcaatcctcagcctgttcaactgaactaaccttgtttaaatcttatagaagctatggatgtcgacaaggagactttcattcctgggcgaacaaaattggctcccggagagacactatcgcccgatccctccacttacgatatgctccacacactcagcacaccatggccatgcctttccttcgatattgtgcgcgattcactcggtgataaccgcaagacctaccccgctactgtctacgctgttactggtacacaagctgagggctcgaaatccaaggaaaatgaactcatggtgctcaagatgagcggactgagcaagatggagaggggaggtgaggattcagaaagcgactcggacgacgacgacatgggcgagcccattctggagagcaagtcgatcccgcttggctcaacgacgaaccgcattcgtacccaccagaccccctcccagtccggtgattactccaagcccccgcagacccttaccgcgacctggctcgagaactcgcaagtcgtcattcacgatgttaccgcccacctttctagcttcgatgttcccggcactattcttcctccttcggcatctaagcctctttccaccctgcgcatgcacaagactgaaggatatgcattggattggtctccgctccagcctcttggaaagctgttgaccggtgacaataacggattgatctatgccaccactcgcacagaaggtggcggctgggttaccgacacccggccgttcacaggccatgcttcctcaattgaggaattgcagtggtctcctaacgagcgcaacgtgtttgcatccgctagcagtgacggtagcgtaaaggtttgggatgtgcgatccaagtcgcgcaagcccgccgtggacgtccaggtctccaaaaccgacgtgaacgttatgagctggtctaaccagaccgctcaccttttggccactggagccgacgatggacagtgggcagtctgggatttgcgtcactggaagcccaatgccgcggcgccttctgcccagatcacctctacccccgttgcatcattcgacttccacaaggagccgatcaccactatcgaatggcacccctcagacgacagtgtggtggccgttggctcggcagacaacactgtcacactttgggatcttgctgtcgagctggacgacgaagaaagccgccaggccaacatggtggacattccttcgcaactgctgttcgtgcactatatggagtctgtcaaggaactccactggcaggcacagatgcccggtacgctcatggcgaccggcagcagtggattcaggtatgttatattcgttatcatgcggttgagccaagctaaccagttccttttaatagtgttttcaagacgatcagtgtctagacgaagaaaatgtatctacgctccgactaactcgggaatttcatgtgccatgtcttgctcatataccattcgaattctgtggattttttgctcctcaatatcattatgctcggagttagaccctttccttcagatggtcagggtggtgaagaaaaagtttttgtcgttatatctggcatagtaaatagacagatcgcattatcaatgaggttgatatacattctgcagggatggtacttgacagttgacagcggaatgatccaggcaactccgcctcctttgacagggcaattctgcaatgcaaagcatcagcagagcatatgcagcggaaatacccctatcactacttccacggacttatccaaagatgtgaactcgctatcctcgcctattcaaaacatcaaacatacaagacgttggcagggataacctgcacatgtgcaaagtcacaggatggaccgtgtcagatcgccaatgcgccattaattactccgtacagacagatacatatgcagcctattacatgcgacgtgacctagtacatatccgtagcctttcggcgctgacttggcctggggccgagtcgggcgcgacgaatgggccagtcggctcaatgattctcgacgtagctgaatatctttctttctttatatacggagtttatatggacataaaccgataacatttgaaatacagaatcaaaagtggtacggatcacaatacacatatgttgtagtccaaggttgcgaagctgttaggcagatcgacttggctgcgcattgtggcgatgtgggatgttttctttgttgtcaatgcgaaaagacccactcgacggtgctgtattggacgattattgtatggatattgcaatgccatggcatacataagtacatatggagcctgtggagtggattaacgctctaggtatgacatgcatgaattcgaatggagactgttgcgcgcatttgtgtcagacggatttgactgttgtgcttgtgtttctcggctcaagacatcggagtcaggtgagaagtatattatatagcgtgtatatacctacatgtagtagtctatactgtctatgtgagatacctcggttgtggtgatacctagaagcagtgcgtactgtatatgtattcagaaatgtaaatctaataatcgtatggtacctcacgctagaaaaccaatcgatctgatctaccggccaagtctgctcctatccaatctggaaaagagcattccattctctctcgtcatcgtgcctcgaataaataccgctaatgcacgcccgaatccagcccaatcacatcagatctaacttctgtcgcgtttgcgttagcagagcagaaacataagactaaaatagctccatttttgcgacatcggcttgttcgccggtcgaataatctctccgatatcactttactatttgtcaagtccagcctcttttttctcttatcggagaatcgagcggtctgttccgccggtaatttatgtacagtactgaaagaccatatgatgtcgaggtactgatgttattgccctataacataataacataatgttgcattcgatgtacatgtgtacattatagttactgggtacactccatactgaaactaaatataaacatcttcatgtttgatcttagcgctggatcaaccccaggactcgccacaaatgctcttcatttccttgatgaaaagcactgttcctgggcaggtccgaacacaaccaacgccgtaccatggcagcttctccgatccgaccttatacccacactaaaccttgatcgtccacagggactcggcccatccagtcagaccgcgagcctgagcgcctggcgaggtagctatttgcgatctgcttccgatgtagtattgctacaccgttctccgtactccgtactatccactattcggagacatagcgtcaatacggagtactccgtacggagtccaatatccaatatccaatatccaatatacaaaatgatagctaggcgtttgttatcgtcaatatacggtgtcataataatgatatctggagtaatagtccaggccgtatcagccaattgttcatcgccgggcccattgctttatccaggcacatggccgagaactgcgcagatcaatcgacaatactacgccgtaaagaattgtgtctctccatagctcgcgggagctccactagcctccatatcttctatccactccattgctatgaattgtcattgcctggattgcgattgcgtgtttcgagtaaatatgtggccagttgatcgtgtgcgacatttgacttggttctggccgggatgcattttcgccaattgccgttatttcaggccttcggtcccctcgatgtcccggcgctgatcatccgtgctgtcaccccacgtctttttgccgctcgatctggaatggcgtggttgacttggtgcctttttattatgattcatggttctggtaagtcaagatacataagaagaatacaactgtggtaggtccgataaattcaaccgagccattcgactctcgagttcggttgtctgtattaacggtttcattgtggacctaaaatgacgcatggggccgagacaagagcctcactgtgcaagagaattaaacagagtgacatacgaggcgaactcaggcacaccgtattcttctttgggctaatctgattaaatcgaggtcaatccggaaggaatctacgatatactgttaaggtgcgccaatgacgccttatcgactgagtactattcttcacagaaataaaccacccaacccgggtgcatagtcacatatccgatgagctacccggtaaggacaaaaacaaaaacaaaaggcccggctgaaagtccgatcaggggtgtcaattccgccatcccgcattgatgccagcactggccactacggcccccccatgatacgcagggatgggcggagaatttaagtgggacgttttgatagctagacattgcctgagccggtgttttatcggctgtaatttattgtctcgatgaattactgcgtaaaacacggaaaagggaagttgactgcgctgcatgttatatagtgtatattgtcagatcatctgcgaagcgcggttatgcaatgacgtttggtggaatcggcgctcgatgtatggctagcgctcatacaaggatgcccttgttcgctagtatatatgtagtgtcaagtgtagtgcctaagagtgcaggtgcagtatcatcgcatgattagggccagtggcgtctgcccctgagttactgatgagctcatgacgaagcgatggatttctcaatgaggacctgcatcagaagattggttggaactgacggatatcggcgcaaggctgtatcctggggttaaatctgtctatttaggctatatggcatttacgaacggcttcgctgcgttgcgtaaccagtatcagctgtgttcaacaccggtgaagtatgtttgggttgaggtgtacgatgctctaaatatctagaggagacatgtcttcgccagaaccaatccccttcatctacaatatagggctttcggatatactccgtggctcaatgtcggacatatcggatatattgctcacgaggtcaacacggcaattacattatacttgcatggacgcatgcaaattattggaaataggtcggatgcctttagtatgtcgatgttcttaaggggaaagccagacccttgcagcttattcaccattgggatagtccggatcaaccccgacatcaacacagcttagagacagctcactgcgtcggagctggggagggtggcttgcggcactgccatttcatttgtcaaccacccctcttgactcatctcgggtcacctgcagcctccttagactctccctagtgtgcaactagtgcattgtcaagtccgggggattctgcaaaagaggtgtccgtgcgaccaaatgcgagtctacaatgtattccagacatggcgagggttggaaaaaacagataaaggaaagttgacaaagaagcgttcaaagccgtgtctgtgtgaccgctttcctctttgtctgcatccaagtccaccttggaatgaccccaaagctgtgttagcaccgagatactggatcgtcaccataaccccagatccggcaccgatccgatggggtcggctgcacgcccaatgggctagggtgcccatgctcgcctcgttccgtgcgacccaaactcaaaacggcgtggcgtaacgtggacaacgagtccttacagcgacgggatggagattctagaaaacgctcgaggggcagattccggggaaacccaattaaaagtctgggggagccaaggacccgaaaaaaggaaagaaacaaaacgaccccatccaatgttcccttcaaattacaacccttcgccacgccagaccatgtgccatagggaaccggaggatattccttgtcggcacatccaattgcagcacagccgtgcgtgttatgtacatattccgttttatgtctgggggaattccccacacgaacccttttttttttttgacttggtctcccccacaaaaatggcgcatggatctttccgcttgtttatacccggacactccgctctcgggatggattctggaatgtttcgtttcgatgtcgaagtgagccttggaaaggagggaattggaggcgaatgggaataaaagaaaataaaagctgatagaccggtcacgagttctatactacatatagattaccattatgataaaaacgtgtatgagcttgttatgctcagtaactctcgggcccaccccgatacttccaggaggcttagaggataatattaaataattaaaacaatatccacccggggcaggaatttggttagtgcagccgcgtattctttacgatatacacacctgggcagttatcatcagttgatgcaattcagttgaaaccccaaattcccaaattcccgaatgtccgaattcctatttaattcaatcagtcaattgcattccagagcatgcaattcatgtttcatgaaacggtaaataacatcgtacgcaaataacacaatactagtcaagtctggcgttacgccgctagtcccaacacggcaagtacgtggagaccaatctcgttgataaccagagccaggaactggtggacatccggtagaacgtgcgtgtccgtaagattcagtctacgccgcattcggtatcaccctagttaatcgtgggggcatcattggcagagacgatcagcccgtgtgtcggggatccaccacctgcgctctgtatcggtaccgtctgctgactcgtccgtcactcgtctgctgtgcggttgtctgggcctgacatcgccctggttggtagttgcctcgtatgtaccctcggtgtacctttgtcctcggaccctcttatcaccggtacctccagagtacttccccccagcatttcccggttcctctctacccgccactactgccactgccaacggtgtatgtaagtaccctggcccaggtacctctcgctctgctgtagaacgactctggatactcaaccttcggaggcaatttcgaacttcccaactacttccacctctcctgccatccgtctcttttcatcatcgtcgcttccccggtgttgtcgtgggttctcattgcttatcgacaattgcctatctgcactccatcggttatctttggcttatccaactctctccaagttgcgagatcaattcgctcaatggatgcccgagtttaaaagcatatacaagtcactgctttagctccgccagtctgatgtgagtgatctgatcgaagtgcgatggctgagtatcattcatgttggtgcagtccgctgatgtcgccgattacaaacagacgtcaagcactaggctccataccatacccccccccccataccggtctcaggtcctcataccctgcaataatcgaatctcattcaacctcttctccaaacacacgccgaatccttcgatagaccgactgtaaatttgttcgccttatattggtgggtccccttcatctatctcacgacaaggttcctgatagcctcggtaccttgggtcgttgtgatagcaaccctctacgcatcatgcaagacacatgctgacttgatgtcatttggatggaacagtcgttgatgcggcacattgtacaaatttgaaagatcaaatatcgtgcccgacgcgatcttcgttccatcatacgattgacgcaacctctctttcttagcaatttcccgagtcgcaacgacttcgccacctccgagacctgtgagcaagactttggtctgtgaggagtttccaaagactagaatgctattggatgctatggtcggacaagatcaggaccataacccaaaagtggtggaccttgccagtatccacgaaattccgggaaatatgcctggtgagtttcgcaaagacaattccctcggtgcaattcttaccatatgtagctccaaaggacgcaaagaagcagaccgacctgagcggtcaaatgggtgccaatggcaacatcccgccccctaaaacagataagcctcggccccacgtctgcaccacctgcggtcgctcatttgcgcgattggagcacctcaagcgccatgagcgctcccacacaaaggagaagccattcgagtgtccggactgcgcgcggtgcttcgctcggcgcgatctgctcctgcgacaccagcagaagctacacatgaccaccacgccatcttcccgaccgagaaacggtcgccgtgagagtacgggcgccgcacccggtgctaaccgggttcgcaagaattccattgccaacagttcagcttcttcgatgcgcccgagggccaacaccatcagccacgttgagggggcggcattgggtatccccggtgccggtaatccgtcatctgcgcccacccaatcggctcacgcatatcaccccagccttagttcttcggtcggctcaagtatggactataggggattcggctctggacacacttcgatgaacggcctcgcgaagatcgaaacttccggacttcctatggacatgtccggaggacttcggactgctcccgtgtatgggagctttgacacgggtatcgatggcatgctgatgggccacggtagcaccatcaacccagcgcaattacactttgcaggatccccacaaggcttcaacgattcgccctcgtctccgttcggtcactatcacaatggacttccaaccactgcggatcccatgatggatgaagatatgcactttgactggatgaacgggtttgacacaggcatggttatgggaaatggcaacgactcagtcattgacgagtcatcgccatccgcaatgagcacgggtagccagagcggaatcagcgaggccatgttggatggtccgaatcgcattcctatctctaacggttggcacaacgcgttcactgcccaccacccggccaaccaattcgccctcgacttttccccaacgacgttgaacgatctggggttccccccggagacagtttctcccaagtctctaatggcccagaatccgttttctgagacgtacgctacccccccatctatgacctcggtcggccagcccgtcatgggaggacattctcagagtatgtttccctctatggcaaccaacggagaatctcctaatcctctcaacgttcctttcccgaatagtgccctacgaaatgaacattcaccagtctcaacggatacatttacagactccacacgacaggctctattagcgagcatgtcgacccccactggcttcaatcatcgcaagtattcccagcccgcaagtggacttctaaacagtcgcgagttgttcgcctgttcgactggcttcaacagctccagtcaactgcccagcacctcggacttacaacggtacatttcggcctacatcacctacttccacccccacatcccgtttctccatatccccacgctcaatttccaagctccccagtatacaaacaacctgcgcacgccaagcggacacctcaatctcagctcgaccggcgtcgctggaggcgggggttgcctgatcctctccatggcggctattggtgctctgtatgaatacgaatctgccgcctccaaggatctcttcgacgccgcgaaaaagatgattcagttatacctcgaagaacgacgaaaggccgacatgtctgctgctctcaatcgttcacattcctcccgcgatagctcagtacacaacaccccgctttggttggtacaagcaatgctcttgaacgttatatacggacacacctgcggcgacaagacatccgcagatattgctagcacacactgtgctgctttggtcagtcttgcacgcgcagccgaattgacacatcacctggaccccaagaacctgccgcaagatcatcttgttgctggtaaaaatggaaatgattctgctggtgactcggaaaactggatgtcttcgtcgtttagtcaaccgaaagagcgccgagattggctgaattggaagattggagaggagcggaaacgtaccctctacgctatctttgttctttccagctttctcgtctctgcctacaaccattcacctgcactcacaaattcggaaattcgccttgatcttccctgtgaagaggacctttgggcagccgaatcaccccaggcctggaagaagatgggcggccaaacaaaaacctcgtccttttctactgctttgacgtctcttctaactgccagccaacgagagcagaatcaatcggcgaacttgttccacaactctgacgatctctctaattctgaaaaccgcccgagtactttcggctgcctggtactcatctactcactacacaactatatctgggagactcgccaaaggcacatgggccgacaatggacaccgcaggagaccgatgctatgcaagcccacatcgagcccgctttacgggcatggcaagcagcatgggctagcaaccctgtccacagcctagagcgaccgaatccgttcggggctggacctttgtctgcagacagcatcccccttctagatttggcctatgttcgtctattcgtcaacctaggccgatgcaaagaggcgttctggcaacgcgattggaatggcatggcggatgagctcgcacgtggtactgagattttccagcactcagatgctgcaatgaacgacgttgtcgatccgtctctcacgggtcacattgacgtgagacgagactccatcgccgatttaggagtttcagatctagccatctccaagacaccgacacaagatgatcccatgcatgctctctccaatatatataagatgggccaacctaagcgtgaaaagcacctgcgcaaagcagcattctacgcagcagattctatatctatgtcggatcgtcttggtaacacttttgccgagttctcgtcgcgtgaactacccatccagtgcgcgttgtgtgctttcgattgtgcacaggtgctcgcggagtggatcactactgttcaagaacgggtgggcccctaccttggtatccttggccgcgacgatgtcgacttgactcaagtacctggagtcatgctattagaagacgaggactgcaagctggtggacaagatcaaggaaatcttgcggagtattgagatgaaaatgcagcgccagtaccaaactggaaattccatgtccgcgctgagtgctgtgcaacggctacctagtcttgtggaaggaggatacggatgtaaaatattgattgcgacagccagtcttttggaacgagctgctgtctggccaggttagtttcagccatctccaaacttccacaaatcaaaacgattctctaacacctacccgcagtgacgaaactgatggcccgctctctggaagcccaagccatgcgaatgaaggagcgtaccgagcactccgtgatgatgaccccttaatgaccattcccaccaccatatattgcccccatctctccaactcctatttcgcattcgcgcgcgcccgtgtatcatgaataaacaatccaaggcaacaacaccccttcttcccatcgaagcatgtgtatctgcaccaataacccgcacccgttccctccctctctctcgcaacatgcgtaccgcctttgataccctgctttgagactttgattatctgtgtcatagacaaattgcctgctcatgtcatttcatgtttctccgattgttagcgttcttgctttttgtaacccccgactgatgtccttgctgtggtgtgatgttgaattggagtgtggaaatttctggtttcctttcctcgacttactgacttcggtcgaggctgagatttcattattctttcctttgcctgtgcggtgtttgattatccagaattatacttcgtgtgaatatgatttacctttcttcaagggttgctgttagtatgtaaactgctagatcacgatctatatatgccaacttgcaattagaatggttatagctgctctgtaatttcgtcatgatcgcaactgctgaagttgggtgcctaatgtattcaaaagtggtagaatactattgggtaaaagtgacaaggggtcacgtgaatgaaaaggtatttcggacaaggatagagcaggcgataccgccatcgtccactcctgcttttggccatgagctcgtctgccaagcgccctgggcgcctcgggggcaccaagtccaagaccgggtgcgatacatgcaagtcagttgccccctagaaagtcgattagtagccgtatttgacatttgattcgcagaattcgccgcgtaaggtgtggagaggagaaaccacactgcctgagatgtactagtacaggacggcggtgtgcctatggcgggggtcatgccaggaccattatcgggcgactccagccggacatcacaccctacacaagtcagggatcgcgagagcgtcgttctttcgaattttatttccaccaagctggcccatcactttcaggagtcctggatcaggctttctggagaggatccgtcctccaaatatgccgggtagagccacttatctgggatgcgatcatctcgcttagcgcgctctacgagcgacctcccatttacgagacgtcgccgtggtcgcttataaatgatcccgccgcggtacgacatgagtaccatcacgaagcgctggtctggtactcgcgctcactggctcttctacagcaacgtattaatcagggcacggcggacctgacggtgtccttggtcagctgcattctctttattgccattgagcttttacagggaagccgcaaagctgctcagattctgtacaaacatggtgcgcagctggttttcagtgcttcgtcaacagcgacttcgactattgcaaccctcgagcctatctttcgccgtctggggacatgggtcttcctcaccaatggactacctgaagaaagctgcgatcttcatttggctgttccagacgagcaattcaaatccatcgaagaggcgaggaacgtcttgtgtagcattgtagccgaaatgaaggcccttaacattgactccaaagcttatatacaccgaacagcagatggccggctgcacgaggtatcggagttggcggccagacaacagcacctgaaaacccgactcgctcaatggtatcgcctctttacagacttgaaccctatgcttacctcgaacgtcgacggtgcaactgcgcttcttctaatgacatataagagtgtcttcatcgaagcagaagccatgctgaaccctgatcaaagtgtatatgacgcctacgaatctgaattcgcccagatcattgacctggcccccaccgcggttgcatggacacgcagctcggaagggaaacaaccaccattcatgtttgagatgggcgtgttccttccacttttcataacagggctcaaatgccccttcccacaactacgccgccaggcgttacggtacatgggggaagctcccccggcacaagggctgttcatgtgcactccggccgctcatatcgtggccattcttattgggctagaagagaaccccgacaccatgccagaaaaggtctcgcaggtatatgagctgctggccaaaccggggcatatcccaccagcccagcatcgcacatgtgattttagtgtgtcgtcagtcatggataggcatggtaggacgcggaatttgttgaattatacactttaccattttgatgatgagggaaggatacaaatcgtcgagaaaacgctgccattccctgcatgaggtcatcagctttaatattttttatgataatacgatctaatctctgagaacacttctacaaagactactagaaaagactgtcgtctaagcgcagagtatgtattcttgctctcttttagttcttagtatatctaaagtataattctttatttattcaatccgcacgacctcgtctagtagtttgttttatagaaataaagagtgcaaaatgattgcggtgagccaggcggtcaaggcctactatgggattaggggataaggtatgatgacataatatttccccacccgtgggtctcaaggttgctggggcatcaaacgcgttaagtggtttcgcgaaccataatctctgctatatctgcctggtatcaatcgcacatggccagtctatctctgtgctggaaatgaatacagcctccaagcatccacctaaaaccctcccatcgcagcgtccgacagccgcggcttctccacccaagaattaatgtccgctcagctcgaaactcaaccccaatgccctatccacggcctgtctccccggtctctctcgaaatatgcccgcactcatcctcggagatagactcagatgacctggttgcctcggatgatgagttggatgatgctgcccgagctgcaaagcgtcagcgggtcgagaagttggcggagtcttatctgcagggcaaaccgctgtttattctctcctcttcgctccgaggcccgcttgataatggatgggcgaatccatggaagaaaaacaggacacggggtactggcgcagcagtgaaagctcgccagaaaaatgttcccgagccggtggtcctggaaactgatttgcaggccccgaaataccgaaaggatctatcagttggtactcgtcgtccggatattccagcgacatcttggaactcccctaggatctctgtgcaaatcggagaccgttcgtcaccctctaaatcgccacggagacatcccaaggaacccatcccgcgctcggggcatactgcgcaaaatagagcgttgcgacggtctcccatcaaatcaaaggaaccgccgtcggcgacagtggatgaaccgtcgttaatgccgcctaggacagcggattggctgaagaaggatcggaagctcatgaacttcaccaggtttgaaccgccgagctcgccaacaatatctgttgcttctcgtcagtcggacaaagctggtcgactggcaccgcgctctgttcaagtccaggtcccacagacgccggcatctccagaaaaatgccatcctgtcaagcctgtcctagcaaagacagctcagagtgctcgtgtgaactcgaacgagcacgtatccctgcggtccattcgggccaccttgaattcacctaaggaccctactgttccttctcatttgccccgggagccgtctctccgaatcgttgattcttcctctcaactgccgaggtttgaataccggaggtggccccgtgaacgttctagtcaacagctgaagacttcccctatgcgagatgaaagcatcttgcaagaagagacttttatacaggaggacagccctctgaaagaaaaatccatagtcgatctcgaacctgccagtcctagtcccgctaaggatcaagcattggatcctgctgaacctgaacccgaacccgaacctgaacaaccacaaccacgacctagaactgaaactgaaactgaaactgaaactgaatctgaacctgaacctgagcctgaacctgagcctgaacctgaacctgaacctgaacctgaacctgaactcgaacttgaatttgaaccctcggttcctgaagaaataccagttcagaatgaggactctatcaagaaagatgcaagccataagaccttgtcgaaagaaactaggtttgcagatgaggatgatctcatagaggataatcttggggtggaggaagccgcagcagaaggtgccgccgatgcagaggctgtggcggaagatgttacaaccgagaaagatatatcgacattccaaaacacagatcactctggatcaactgaacataacacctacgatgatctcccttctgcccaacaagtgccaccccccttgggagtgtcagaccgggtaacgtcgcttcactcgacggctttggcaagagtagacccaggacaagactctccccaaagccccgatacccagctttcgaccctggctgcccttttgcatgcccagaggtcctttcaagacgacctggacagtccagaatttcacgctgagacaccggattcggaccgagcagtgcattcacccgatgcttcacttcgctcagccaatgtcactccattctaccgtctagaagagtcgattcgacgtgatctagaacggagttcaatatccaagaacaaggatgggatgcatgcaatgagcacgcaattcatgctcgatgcagctacacctttcaatttcagcactgagcaagctggtcaagatcggagcttgaaacccacgaacagaaatatgacgcaagcaatgaatacgcagttcatgctcgatgcagctacaccctacgcttttagcacagagaagagacagcgtacatcccgaccagactcaggttcacctacggcgagaggctccaagagaaaaagaacggccaatatcggaagcccttctccttctattaggagtcaatcaacatctgtcgacaacgaatatcacactgcggaatcccaatcaagcgaagatgatgaaagctcacgatcagtggccgagcagttggaccatcaattaacttatcaatcccccacagaagctgcgtccttacccctcaccttaagcgaatcggtgccaacaacaggccaggatggacaaggcgttcgccagggaatggagagcttcaacctcagtcaggcaattgcggatgctggtagttggcttcaacaaagttttgatttcatgagcagcgctcggccaagcaggagtttcaacgcgattcctacttctgacgcgcgcccttcccctttaaacatggatgtatctcaataacgagaactccttgatgctagcgactaagttcctcacttcttggtcttcccatcttcccattttcttatcttccatagcgtgttgagagcttcagcttggtagcgaagctgttctggacatgacaagatcgtatagatactgctcgaccacggagtcaaacaatctgcaccctatcaatctcctttcaaagggtttaaaagactataagacttacagactacacagcctactcaaatggaaccatacttcctttattatcaattcctcggccatttagataacggcgctatgattctcgtcattggccatgagccacttaatgtttagtcatcggcttgaaagcatcttcactttacttcataactatgtaccggataatggacttagtcatgaattccaatatcattttcggttataaatctagagcaacggagacgcaggtgtcagattccaggacactctcagagaatagactgaacactcggccaacgatactcgatataaagttcggagctctcaatattaaaacattcggctgattgattctctacactagacttactatttttcttaccgcaaacagcatctttaatgaggagagaagggcagccttagccatggaaaacggaatattattggtagttgttgaaacaaacaaggggcaatatatgattcaggataggcgaccagaatactagcgtattacttatgagattgaagagcatgctataggaatataataatctcgaaatgttttgggaaggacttttgtctgaaatctgttagctaggaaatggataagaatcgaacgcagccagttatctcagtcctaagctgcccttaaggactaactcagactatttattctgctgagcgaagaataagtttcgaaaccgttagtattctaagtttgtctctacctaactattccgttcgaataaaacctaatgtaacattattatatagattcttccgatgccgcagaggacaatgacagcttgctataataggaagctatcccaaagccaggcatagaaacgtacgcctttcagcatgggaaaatccaagaataaacagcgattacatgctatagcctgaggcagttggcagtttcgaagtccggtactattaaatgcttccgaaataaagatagttggcaataccgagggaacatttcaagccactacttattaggacatgtcttatgtatgcttgatacttggactctgagttcgcgacaagtcccaaaggcccaaatgaaagatgcaaatgggctccattcttatataaagggcgtagttcccaagagactacgcaggggtcctttggctgactggatttaagtaacatgaccttctttgagatctgagagggaacagacccgtgcttgaacccccccagtttgatgtcacctactaaaattcacttctacttacatatgtttaacagatacgtccagataaacgaataacaagctgaagatgaagcagattgttactcactctagatcaaagtcaggatgtttgagaatttttcagtgttattgggcactctgtcgctcatcacttcttactctgttcttaaccgtttgttctttgccgtttgctgttcacaaattgttgctgactatttgtactcgacaaacaatttcactgatcattgggacatacaatagagcaaccaaaccctcaataagatctcagacgtgaaccctgcgagtcagttctagcttagtaggctatttagtataagtagtattaagatacagtgaccataaagtagccatagtatccttaccgatatttattaactagtatagaataagatgataaattaggggacaaccgttatcaaatttagaataataaaaacgttcaaccaagcaacctttggcctaataggccgaacaaacagggccctatggttcatatggggtaataggaagcgtgcatgtacagccaaggtcgcggttgaaacggttacagttgttaaggagcgctgttctactgttagtaaaagttcggagatctaccatgacgacctcgggagttagagatctcttttataacctagacattataagtaggtaagtataattaaaccgtttgcatgcagaatatgaggacctgtgaaatcgacgccgaaaatatcagcttttgacgccagagcggctatagtgcaatgcacattaatatacacctatagattttgaatcatgcaagtacttatagaaaggggtgctcgttgacttaccagcctgcatttgatttttgctcaacatgaaattagttgaggcagagtggttccagcatgcctcatttgggcagacatcctcaccaatgtttctcaacacttgtcatggacagacacggctgagctggtgcaaaacgatgcatgtgagcaaccagacaaaccgaggagtctacaaataccgcccgtaagatcttcgtgccactggatctctacattttctatcagcaaatccattggaatgaaacaagaaatgatcctgccttgaaagagcgtctccttctcaagattgtatcacgcatgcgttcgatcgtattacaatctctcttacaccaatttagatatgcaggtcaaaattccaaaacaaaagacgtttgctggctcatacggtcattggacggcttaaatacagtgctcagtggcgcccttgatcacggcgaacaccccgaaggatatcgcaatcccggaaatcaatatcacgttcggataccgatccccatttgagcttcctggtccaaggcctaaccaaaccagacttcccacacggggcgagtaggcctagggcgcagcctccgtagccaatattggtggattgctcccttcattgcggtattgtcctggtctcgactactgcgccatgtgtcttggacttccgaggcgctgtaccttgcccttcatgtatcttccaatttcccggatcgtcactgtaaatacctcttttcccacccccatcaacctaaaaacgtcctcaacagatgtgccctctgcaccctactctgacaagttcaacatcttgagagacaaatcccacaacttcttctcgccctccggatcgaaggcgtgtggtgcaacaccgaccgccagtgtaccaccctcggggaccgggccagcttcctggcaatcctccagatagacaccacccttgccttcccattccttaccaagtgcagccgttatggttgtggcagcgccctgagccgagctcttggcatacttttgcgcaaactcacttgaaccccactccttcaacgtttccgggtcgacgtggcgctgtaggcttgtggcaataccaccaggcatcaacgagaggccgtgcagaccctttgacccgtatcggtgctcgatctcgttcgtcatccaaatacaagctgtcttggcattgccatatgccttccacggctcgtactcaccctcaaggttaatgttgtcgagcacaacagagctcatgtgatggccggcggaagagacgttgacgacgcgggattggaactcaggtgtggaactggacaagagcgtctgctcgagtagcttgtagagaaggaagtggccgagatagttgattgcaagctgcgactcgaagccgtccactgtcttcgcctctgggcatgccatgatccccgcattgttgaccaagacattgagctgggttgacttggacagaaaggtcttggccgcggtgcggacgctttccattgagccaacgtctagctcaagcagctccacacgaccgggttcaagtatctctgccagagcttgctttcccttctccaaatcccgaacgccaagatacactttaccaccagttgcggcgagcgcacgaccagtttcaatgccaattcctccagaggacccggtgagaagaaagacctgtttatggtcaattccagttctggtcttcagcagcagcaatgcccaccttgtccttcatgttatcgatccggtcgttgtccttgagaatgtcaagagctgtaggtcgagcgtctccaggcccattctgctccaagaaggcctgagtgtacttgccatgcttgccaatgtgattactaatgagcggattggccatgatggtgattgtgatgatggaggatagctggtagattgagtttgcaagtggatgctggggagaaggtgtatgtctggtggggctttatatagggtgcgggggagagcgtggtgatggggtgacttgcactggcacgacttggaacatgggtccagagctgaaagactgttcgaacctcggactttatttcggattttgcttaagaccgtttatcgggcgaggatattcagacagatccacattcagtactatacccgtccaattaagattaactccatcagccacgatattgggcttaaatccaccatatgaccacatcatcgttatttaacaaagaagaagggagctgaaaatgtggtttcgtcttttttccggaataggatagcagccgaaacgaatcgccaaaaagaccatcgggataagcccgagtcgggcaagcggggagacaggaacaaagaaacccctgttggtcgggctgccttgatggctccctaaagaggggcctgaaccctggcccccatacgtcttcggaccctaccaggttacctaccatgagaatgcatgcctggatgattcaagttagaaggcacttgaagcgcctcaataagtacgatgacatatgccttgataatcaaagtacccggattctgctggcgtttgcaaggccaaaaatgaatcttttactccatatacaccatataaatgcggactggcaaaccggtaaataatctggagatacctacatctgtatttagtccataagtttcattttttggacttgcaaccaccggaataatggagatacctgatttgtatggtgtccaaaagcttcatctaggcaggttgatgtattgacaattcaccgtacactgtattagggcggtatagaaagcagtactaattcaggtatcaaggcatcaggattcccctaaaaagggggtttgagggtcgcacaatgcatcttgcttaagcttaatctgtgtaacgcgcttcatgcttatatctattcttgctgaatctatacatttagttgtagcgacgcgtggtcttgctccactgctcattgccgctcatctggtactctaggcccttcatatacgccttggcagcttcagagcagccgtctggggatgcgatcttctctgccacgatctcgtcatgcacagtctcccactcccgagtcatagaccaaagcacgcgtttcgttgcgggtataccaagcttggactcctccgccagaaccttcacagctgaacaaaggaaggctccctccttgtgtccagtccgagacgcttcctcttccttgtcataactgtatatgtcattgactacagaaagctgcttggcacagttggcttcaagggctttcatatcctgaagctcatctgcactgagtctaagtcccatcgagaatctcattagagccgaaagcaacctggccgaacagtcagtatcacgagctcgaatcctgggcgagaacacatacgccttgcctacatccttctcacggtactcgagataatgccccaattcatggatgctcaaacgcgctcgatctgtctgcgcgcgcatgaacacgaaagtcggctcaagaacttcgttggccagctccgcatcatgggcgcgcatgctttcccagaggtcatagagaatgaactcttctggcttggttcggtccgggagcacgtctccacgcgatatcgggatcaatctgttgttgtaggcttctccatccgcgaaagacatatgctcaagaacatctaccctcgtcagtgaaggctacattaggccatgtcctttcgcactcaccatcgataaggaagagaacggtcagcagtcggcaggcaaagtggatgcgatcgtccagtgcaagagggaagtaaagacaagtaacctctgagaacttggcatccaagaaggtgcgaacagccttgaagctgggaaatttccagttctccaggaagtatccatcgacttcgtcctgtacctccttcactcgtggatggcaaaggtacgaccactgagtaggaggcggagtgatcgtcgtgtcatttctgggcctgattgtctctttgaccagagggctattgatagggttttcaaggtgcacgaacggttgggccagggaagaaatggtttctgttgaggtagccatgtcgacgctcaccgggtttgaagggttatactcgtggataacagctttcagtaagtgcgaggaagcatatcgtcgaaaaaataccagacttcggaaactcgtccagtcttatcaggagctcgaattgatcgtgtacgtaggactccgacgacctggatgaaactaattcgaactgtcacatctggtgttctttccgagttcgcgcccggtcaataaccagctgtttcgatgtgtcgggccgagtaccgtatgcatttgcggatttaattgggaaatttcctaaatcggcaaattcaggtagagcgccctcacaggaatagtgtactggacatgtcggccctattaggacatgccggctgggcttcgtagatttgcaccaaccccggcctgagtgagatgagtcagatacactactactaagcggaagcgaccatcagcaacctctacaaacgcagctattcagcttgccccttttggtgatgagataatacagaagctagaaacccctactgccatcaatgagtacaatcactatatcggtaaggtagactggtataaaccaccagagaattcaattctataagcaaaaaggcttgcgtatggtcctaatataagagacaggaatgtagcagcgtggctctatatgtgaaagggcaatgtcggcatgaattccatagaaaatagccacttcgaattaggtttaattgattaaactgcttcgtattactggatcattaccgcaattagcaaaataggacgccttactatgtatgcgctagtaaaagttgtgctgacggacaagggcatactcgggagtgactcggtagatacataaagatcctggccctgcagctgcatagtacctttctgcttaatattgttggctccaattttgatttcagtatctttctaaacaatcatcatgctttctcttaaagcttttttggccctttctctgtctattcatcttagccagggtcttgtggctagcgtctcgcaccgtcgcgctaatgcatgcactgagctctcacgaagctaccctgacagtaccattcaccctggatcttcagtctttgccgaagatgtaattggtaatgatcttctctctatgcatgtcaagccccccacgcggaaaggaggctaacacttgatggtgtagagccctggtctcagacttgtcaaactacgcccacgtgtgtttttgccccagcttcggccgaggaagtagccggtggcttggctatccttcgtaaagccgaccagacctttgctgttcgcacccaagggcatatgcccattcctggcgctgccgacatcagcaatggcgtgctcatggttaccactagcctgaatagcgtacagtacgcagacgactctaaatctgttgtccagattggcgcaggaaaccgttggctggacgtttacaaagtgcttgccaaagacaaccttgccgttgtcggtggacgctttggacaggtcggagtgtctggccttctgcttggtggaggtatctcttatttcaacagcggtatgttaacgaccggtcacttccatgaaaaattgaactaattgagcaagaccacggttggggagcgaacagtgtcgtcaattacgaagttgtgctcgccaacggtactgtatgcgcggcaaatgcgcaacagaactccgacttgtactgggccttaaagggcggttctttcaactttggtattgtcacacgtttcgatttggcaaccttttcggttccatacatgtgggggggtagcgctttctacgacgcctcggctttggatcccttggtcaacgcatacgcaagctacgctgtcgcatccggtggttccagcgatcctgcagctcattctgatccctcgatcctgtacaacgtgactactggcgaggtatcgggctatggtatctatatgcacagaggtgacgacccggcacctgctgctctcaagaacttcaccgatataccttctacattccaggacttccgtgttggaaagacaattctgggcctggagaacgacacgactcctgtgaactttggagtaggaaatcggagacagcttttttcgtccactgctttggcttccagcgctgaggcagtgtacttggtcaaccagactttcttcgacgtgattgcagcaaacccacagatcaagaccacgacggatctcagcgtcaccaatacctatcagcttttcacccctggtatgatcagagccgcaaaagcctcgggtggagatccgatagggctctacgacccactcggcaacggggttctgggtaagcatcttgcgactgtgtctaaaattacccagttcatgaactaacttcttcactagctgttctgtacggcggtaactgggccgatgccaaggatgatgagataatctacaagttcttccaagacatgatcgatgagctcgacaacagggcgaagaagttgggcctttactatgattttgtttacttgaacgacgcagcacccactcagaccaaggacatcttccagaagttctcgaacggaacagctttgccgaaactgcgggagatcgctgagagctatgatccagaccaggtcttccaaactttgactcctggcggcttcaagctcatcaacagcccagcatgaaagcttcgggatgggctctccatggcttcctctaccgccaaagtctcgtcgaggtatatgtttatcgtaggatgtggttactttttcatgtttgtataatgctatagagaagacatatacttggctcacagccgccccttaagcctgtttctccacatacttccccctcctatatctagagtgattcgggaacactaggtgtctgtactatcctaaggcgggtgatatttttattcatttagtgaggtatgtatacgagcactcggcaagatttccaaagaaatatgataaggaggggctaggcaagtggcaagctctttgctacctacttagctgccttacttgaatggataacttgtataaagctgcttgttcaaatacttggagaggtacttggatacatagttggctaggtactcggatggatacatgggtaggtataaggctcacatatctatgcggcaagcatttgtgactgtacttgattgcgggcgagccccgactcacggacctcgacttctacctgaagtctgctgtagcttgctgctttttggtcaagtcagtgttccgccagccaaaccagaccggccgcagatcagccaacttttcctccaattcagtgtagtgttctcccaacgtcaaaattgtgcgcccgttccacttgctttccagatctagcacattctctttgccgtaagtctcaaccatccgtggctgacgggccacggcagaataaaccactgccagacccaccatgtgagcagaactgacgggcagtccggctgccatgagcggcccggcaatatccatggggagtagcttcgtgatggttgccgctggcgcaactgcattgattgagatatcgaaacgggggagcgtcgaacgcaaagaacgaacgagaccgaccagacccgacttgatagcactatacaccggcaagttctgttcaggcgcgtatccagtcgcactagcagtgatcacaacggagccacccttcccttgttttcgcatgtagctgaccgccagtttggtaaacatgacggtacctttgaaattgacgtctaccaccgcgaatccaggctccttgagttcgccctgctcgtcaaaagtatcctcgaagtatggctgttcttcggagacgccagcgttggccacggcaatgtcgacatggcctgcttgggcaaaagcagctttgagttcagcccaagatgtgatgtcggccttgatgaaagtcgaattttcaggcgcttcgccactgtcgggagggttgcggtcaaacaggaagattttggctccggctcttgcaaagatatttgcagcggcaagcccaataccggaggctccgccgctaatgacgaccactttgccgtcgagccgcgggatgtcttcttctttgatgttgagagatgtcatagtagctcttgggggttgaactgagacgtggtggcaccttaatgtatccaagtggagcagtaaaggtatagatgctggctgccatcggggaatcatggcgttgttccttgactttcatgagttctgtgatggattcgcccaactcgaaatatgcccagataggcaaaaagccggaacaacaagaacctactaaaacgggatagctagcaatcaagtcatttcggtgtgcctcccgttgccggtttaagagacaatccgagcagttgcatgctttgtgaattgtgatgcaaggggatgtcgaagtccggcttcatttcccagtgtgaagagattagaaaaatcacaattttatttccaacgcctttttgtgaaagattcaaattccgttattacatgctgtttagtgtattactctatagtatattattcaacagtttgctgggtgttggatcagggttacggcctataaataatcatcaaattatcaaatcgtgaatatccatgattcaaatggattcttttgatatttttttggtgacactgaggtgctttagaaattctcctagtagatatcctcacaggtgccctgcaaagtcatccgcgtctcttctgcaaactcaaatccctttcaggccttgagacgtctttttaagagcactcgcacacttggatcgggatggtagcctcctggtgtccacaggctgtcaggtcgccctatatctcctttaaacttgaagtcaaagttgtcgatcaaatgtacaagtatcatcttaatctcattcgcggcgaaaaaacgacctgggcacgcatgcacaccatagccaaagtccaagttattcgtcccagtcgccgtaaactggtatttggactcgttacctggaaggtccctaagcttctggaatctgaagccgtcgaactggcttggattttcccataagtcctcatcgttcgaaacttggtgcaaagggaaagctatgtgcattcccggctgcagcacagttccatcatgaagagtgataggttgaacgattttacgccgcatgttcagcagagatatcggactaaggcggtgggactctttgagaaacgagtccaacttgcgcagctttggcatggacgacttattgaggtatggcaatggctcggtcgctctcaggtcctgaagctcgtcacgaagaggctgtaggtactcgggtctggcagccaagtcgaaaattgcgttcgtcactgtcatcgaagtcgtgtgaatggctgccatacttgtcgctagctgcatctgtgcctggatgttgaggctatctcgttccttctggttactgttcttgatgttccatgcacacatattgtgaggcccggttcccatttcaagctgctgtttggtgccagcgatgatgggcgccatcaagcgtctcatggtagccagtgatttgtgcactgctcgaactttggtgttgagataccgtgaggtccaacgaagtagccgcgggtatgcccggatttcaggtacagcgaagaaaacattgagtgtgaactcgatgatgcaatctaggtattcctggttacggctcattggaaggcccacaaaaatccggccagacactaatgcgacgatgcgaacaagcttactttggatgtcaatttcggtccagtctgtgaaaagaagattagtgaatgatgtttcaaggtccagtcaccccgagtcttaccgtcgcaaggtgggatcaattcttggaaggagtacacaacttcttcatgtatatcgcccatcaggtgacctgcaaagctttagccacatcaaagacgctgcagtgtaggttagcttaccgagagtctttgtgagctcgttcttgacactgttcaccacagtcgagatccttccgcccacagacgttgtcgtgaaaaggctgtgttcggacaggaaccgctgcaccattatcagttaccgcactgctcaaccgcgcttgcagacatacctcatcaatctcgtcatctagattgagcatattgtcgggtagagcctttagttcttccatgaacttagtcggcaagatgacggtctcgccatgggcctccttcaaggtgaagtatttacccttgtactgtggagagtgtcaatacagctctcgcgacatggtaggttctcactcacattctgaaatccttccctaattgtcttatccaatgctatgagatcgattggtccggtctcgtcgtaaagctgtggagcggggaattttggcggttgtcgaggtgcaaccagggcatatgcgcaagcgcaggcgaacaaggcgattgctgttccgagcgcatggtattggtagctaagtgtaagtacccgagaaaggtgatccagcatatcgacgttgttctcgagatcgcggattggtcgtcgaacgaggtgtttatcaacatgagtgtgagaatcgagagcagaagaggagaagatcacggccatagacgcacaggaggctcatgaatctactgcaagaaaggctcctagcgtcggagcggaagcatgatgggaaatggacgcgccggttttgttacaaatgcctataaaagatatgggccgagttagtcttcggaattaaccatatacagtgctgctcccgaagatacgagttcacgggcttcataccccgagaggtgcgcatccgtgggcaagtggtttgataaatactcttcaggtgcagtgggatacaaaaattcaaagtcccacgtcacttttcgccaaggtattgttgttctcgctacttgaaggaataaacaaaggctcaaattgaagttatttctagtattttgtataccagcctttcgtttcaattactgtttctactcaatttcccaccatcatagctaatctatagaagtttcccatattaatagcatgctatgcttcttgcgcacctttgattaatcattctaaaaccctttcatattaaattcgatgatggtcgccgggggataactgctgtcgcactactattatgaaaaaaccccccaaaaatatgtatgtaaaagatagacctgtatttgaaagcagcaagaacaacattaccgaattagatctacttcccttgccaaaaagtgacataggactcagactttttgcaccccagtctgggtacttgggaaggtacttgagaagttgattgggtgggtacgatcggaggtatttcaataagctcgtgagagaaagtactatcttttatctgcgatatctagccagtcttgacgtctgtccgcttcttcagcgccagcttgacgtacttgagcggagccaacgtgactgtacccgctgccagatgatcaatctcctgcttcactactttcgcgtccatgccttcgccgagcacaatgcggtacttccccaagactgtcgcaagaacactgatgtactcggactgtgtgaatttccttccgaggcaagcgcgagcgccgccagaaaaggtcatcaacgttcccctgacctgtctcgacttgtcctgtgcgacgaccttcttgttagggcgcgaatttggagtgacccctatggtacccatccatctatcaggcttgagagcccagggatcgggccagtacctttcgtggtagtgaacagcgttgacattgaggtacacgcggcactcagccggcaggacatgctgttgtggggaattgttttccgggtagacggtgatagtggtatccttcgggaccattttcgtgataatgcaaacaccagggtacaggcggaaaacttcgtacataaagccgtatgtgtactggaatttctcgaagtcatccgtgtaattaagcgacgtgcgtccttcagcagctgcctctgcataaaccccatctacctcttgaataatcctgtcctgcaaatcctgcctgagagctaaggtgatgaagccgtaagtcatggcgtttgcggtggtttcataccccgcgagcaggtacagaaaaagattgccgagcacctcgtcttcgctgaaggcttgctttcgaccggcagcctttgcctcaaaggctgaagcacgcagaacggatgtaagaagattcccctttgcgtcggcagattggtattcgctgtctttgctcagcttcgcggtctccgtccggatcatctcacgcatatacttctcgagctcaccatgcgcgatagcgatctccttcattgatgtcatcttcataatccatttaggaatgagaagaatcttgaccatgaacgttgtgactaggtgcagcgcgtgatgcaggctcatcttgtaccccggaggaattttgttgcgaagatcagaaacttcagtttcgaagtctaatcttttgccgaagcccgtgtaggaaatgacggccagagtcaatcggttgatatcaagtgaaaggtcgcgagttgtgttttcctgggaccaggactccatgagcgcgcgtgcttggtcggaagcctcgttccagaccagatcgttagctccgctgccatcgttgaaggggggtgcagtaatgcgaacgtggaagttgtacgctttgccctctgtagttgcaacattcggtccatacggctcaaggacctctggcatgtggagttagcgaacgatgttccatgagaatagcgttaaacttactgtatttatctcttggttttagaaactcatttcgcctgttcatgacatcccagcacatgtcggcgtccgcggtgtagcagatgagaccctcaggcgatacgagaaggaaaacatcaccgagctcctcgtgaaccctgcgtttctcttcccaagcccagtcgagaatcgaaaagcgaatccatcgcggccagccctcgcctctagacagtcttgatgtgaacaagggacgaatgagcggagtcaagagttttccaaggaactcagtctcaagtacgggcacaagagtatacggcaggccggtttttttggcttgacccacgtagtacgccaatttgacaagcttgtaaagtatgaacaataatagggtcgtgcccacaaacgagcccagaggcaactttgaggcgttcatagtgcggagagtagacaaggaagcgaagctctctgaggatggatcaagtcaagcgtgaaagctgacagctggttggtctctctatagaccttcctttgtgcaaaaatgatacagtatggtgggagtttgcccgccggggggagttggtttcgagcttttcggtcgccggcccaggacacccattggaaatgcccgaacaagagctctggatcggcaccgcaggagccaaaaggaccatattgggacgcagatcgattcagtcctggtacgaagtatttactggtaggacggacattgaacacatcaggctgcgtcgcgttcaaacagattacttccgagcttacatagcctagccgcacacgtagttcggcccataccctgattagggaagggaaggttattgactagcgctgacatctgacctagaactttattcggaacttgccatagtagttccctccccgcgcatcgattgtaacttggagatgcagtcagcataggtgagagcttggggtagggtactagagcgaagatcgcccagttccatcgttgcttgcctaagcaccgccccaaggatggaacctcaaacgaaagaccccgaccccctaccgcgtctggtgcacataggcgaaatacagttcaacctgggcgaagtgaccacgggcggagtgacgccgcgaggaactttcattttctgccccataactggcggtgagttgaaatatagaaacacacattggacctggggctgacccaaaggcaggacactttaccaccgtctttccattaccggacggattcggcattcactcagaggcaatcgaaggtctgagggcagaggtgcttccaggtggcggcgattatccgctgatacataacaatgaacttgcggaactgaatgtcagcgtcgtcgccaaaggtctcaacaacgatcatatattccgtatcacctctttcggtatatgcgaatggaacaaactcatattcgatatgatgggccagacagccgccgcacgctcgacggagatgggggaaatcaacgcatggcaggtttttcgtatcaacactgatagcccggagtatgcctggctaaactgggcatgcatcattgggcaggagagactgatttacgaagacagtcgcatggctaagactcacatgaaattgttccagtttctggtaaaatagcgatatagagatactcaaattatcatctccacgacttgtatctaggctactataatcatgttcatgtaactggtgctatgtagatttcaatgatcggatgttaagcattgctcattagcatatagtccgcctttcatatgaccttgctcagacagattctctccaagattgataagaccctcgacatgttctactggaacctcggtcagtagatccacattcacgcactatggtccactcacctactcacacgtctcttcgcagggatctctgattgttgcacaatatccaatcaagaggctgcatgtggagctgcaccgaagcggtatcatggctgcgcgtttccaggcaataatgcctgtatatatacgacaagagctgtgcagagacaaccatagaacagcgagagccatttatcctgtcgagtgaacgggacgggaacttcgagactgtagacggcactgcgcttgggtgccatggttctggaaagacgattgcgctgtgaggctgcctataaattttgttaccgaggagaaaagggctggctctaggggcagtttaaatgtagtgtgagtctcaatttctcttaatatgagcgacttttcacgaagcccaaagtagaaattcgccaggttcccatactcggacggagccgagctgtttcgggatatgcagaacacgtgaatcacgaccgccatcttggagtccatttatcttggaagtctaggaagtacctgtttgcatccgcccatgcctatgttggctttacctcattcctcgaaacatcctgcttgtttatatactaccgcaagacctgatctgcctggcaacataagtactgtgatttgcatctcgtgtattgctgaacaagatgtacgagctacaacaacatcgaaagttcagtgcgttggatgaaatgcttccagcattttattactgctacttactttgctttcctgttagcagcgataacagggcgagcacgtccgagctcttgcaaacctccctatcctcgctggcagaagaacgcccatacctgactggtacagtccgaagggatatggaaagcagtgtgcgcaaaggccatctcatcctcgacataccgaatcccttcgaagaccttcgtatcgtattcaacgatctcacaggtccgaagtcccaatggaaggagacatatcaggatctgaaagacaccggcatgccgccacacaagctggatgcaaacttgttagcacccctgacagccggtattggagagacacggaaagtcatgtcggtgcaagccaactttatccacggcggactattgattgccttttgcttccaccacaatttcgtggacgcatatggggctggacgcattattgcgaggttttcagaccactgcaatgggactgttgacctcaaaaatagcgctgatccagagggggacggtaccgattcgaggggcatagcagacctcctcgacgttgaacttttgaaaaagcagtacaaattcgaggacctggaaagtgacccaaacctctggcggctcaactgcctcgagttcaggggggttaacgattttcggtggcccgatttcatccctgcccttcttccagtgaggaagccaccagtcatctcgagtatgttctcgttcagttcagacgctctggcagaaatcaaagctatggcacaaccgaatcaaagcggagcgtgggtgtcgacaaacgacgcgttggtggcctttctgtggcgacataccatgagagctcgctttccatcatcgagaaccgaaagcgagcccccaaaccgcaagtcaaacgtggtggtggcacttgatggcagaaaagacctttctatatcaccaacctacatcggtaactgtcttttccattgctttacggacctgccgatcaatatggtaggaagtgagagcacccatcttggtgatattgcgatcaaagtcagacagacgatcaccgcggcccgaaacaaaacgttgctgaaagctgtcgtcgggctggctgccactcacccagattgccagacaatcaagtacgccaacgacaatctggggcctgacctgtacgttacctcttggattgatctgccgttctataagcttgaatggggcccacttggtaagaccgagttcttccgcattccagaccgacaatttgaaagtctctgttgcattttgccgccaaaggatggggttgtccagttgattacatcgatggaggaagatcatagcaaacggcttcgaagtgacgcagagtttactagatttgcaacttatagatagccccatagatagccaatccgcagcatggtgtcaggttcaatgcttccctttgtaagtcggttattggctggtcagtcgattgaagcatctattcacacgaatattggaccaaaatgaataaccaatttgctttgagtatgaaatgttcccaaatgtattgacctcgctatgccttgagtgtgctaccgtccacagagtgaaatctgacagtcagggcaggcttgtcccacatgacatggaccttgctttgtccttcccaatccagagactgatccatcagctccatatcatatttccagcaaagtttcgaaaggatcaaatttagctccataagtgcaaaactgtatagactgtcagacgctttttgtaaacagctacggagctgtgccacttactttcgccctaggcatcctcgaggacccaagctgaaaggctgagatgattctttgatatcggtcgacttctcattcagccatctgtttggatcgaatttcatcgggtctttgaacatttggggattgtgcgtcacagtccatgcgctggtatagatctcagtctggcttgcaggttagatagaatgctcatgattgagaagaaactagtaaacacgtacaccttccggtatccattccccatcgattgcgagacctggtgatagtctcgggaaaccctgtgagccagggggatagattctgagcccttcattgataaccgcctgtagatatggcaactgctgtgcagaggtcgcattgattgactcataggtagggaagcggtttctgatttcttcacgcatagctttgtatacctccggagtcttgagtaggtagtacactgtagctgccaagaaagttgcgacagtttcgcctccagcaatgatgagagtggatgcatgagctgtcatctcctcgcgatcaacttcgccggactcaacctttgaaattagattggacatgaagtctttccgaagattcttgttggtcatgcgctcggcaactttgtctctggtgaattgagagtgcttatttcgcaccgcagtcagaacaggtgccaagaatcttgccaatgtcagtgcaaatggcaggcgccgcaaattgtccgcaacggtgataaagtaaagatgtttgagaatcatttcctgccagtagtgaggctcacctcggatgatgcactcgaaagattgcccaaaggccatctctccgagtatgtcaaacgctaccatttctgtccacttagtcatgtccaggccttttgtctcggaaccaccgtcgttgccaagtcgcgtgatgaaagcatcaacggtctgagagacaagtggctcctgctccaaaagggctttcgtcgaaaatgcagcagacagaaatgacttcatctgccggtgcttctctggatctctctcacttccaatgcagagcgagttaaaccccgacccgtacatatcgtagaattcactttttgttggaatcatgccccctggccggtggccgtatattgacttccatgaggacacagaggcaaatgagagctcgtttggagctactctaagaacggggcctttttaaaaaagtcagcagctgcttgcgtccgggcacggatgaacttaccgtatttctggtgcccagcctctatggatcggtggattctgcctttcaaggtcattcgcattcgccatagctaattgagtcagcgagaggaatagattgagtaaattgatatcttaccaaggtcgacctagccaatagtggtcccggaaacctggccaggggatggaaccagaggttaaagactatgaggccaataaaatagcagagggcctagccacttgttagcaaaataaagggcctggtatggtatgaaggatcgaggtgtatggccattggccaatgccaatgagcttactgctgcagagatgacgaatgggagcacgtaaatgctgtgggggggttgatcatagacgaataagagaccggggattggagatatggtcatgttggagtaggaaaatttgagttgcatgaatatgctgcggtaagaattcacttccagatagctcgagttactcttccgaggaaatcgtgtggccacttataaacataagcggcttcacctgttcggactcatgctgttttgggtcacatttgcctttaaaggtctatatccgacatggcgaaaagctgacacaacgacgccctgctaactagatcgccgatctctcttcggcgtaagcactactcccatcccaagggcacctcccgttctgggtaaattatccctgaccaatcacagcatggaacggcaccttcgattcctcacacatctatccatgtacgccttttggtcatagcgttagcggctcttcctggattttgtggatgtttggttttgttttttttgggttatgtcggtcgaagggccggcctggaggcaatgcaggcgtgctccgtgttattatgtcgtattttcgcccgtcgcgcagctgactcgcatatgcaggagtggcgggctgtgcggaccggtgcgaacgtggcgtcccacgagtggtgtagaacctgcttggcagggtagagcatctgcttactagataacgataatagagcgaagaggttagcgtatctggcttgactgtagagcgtgttactacaaagctgattattgggaggaggagatgaagaagaagaggaggagatgaagaagaagatgatgataatgaagaagaagaagagaagtcctttcttcttcttctcttcctcctaagaaggggaggagggtctcttaataccgccctaagtatcttgatttactaaatgtgacttatgcatctcccgcccgaatagcttcataatccctgccctacgtgagacgccacaataacaagtacatgtcagcataacagtctacatactataattcctggaaatttgagataataaagttcaaggcaagtgctcgggtctctacttattcacaaccctctgagaactgagatcacttgctaggccagaatgtttggaactctcaggatcgggtccgagaagaactctgtggaatttatcgagcatgccaaaggagaggctgcaagccgattaggaggatacgtcttctcacattccgcttgtgaaagctgccgattaaaaaaggtaaagctttcccgtactagcatcggttggtttgctaatataactcctctggtcaactagctacgttgcagtggacacaagtctggctgcgatcgctgcagaagtcaggcgatgaaatgctcctaccaaataggagccccgagcaacagctcgcgaccgaagtcaagatcacatttccaacccaacttctctaacatgagtgggacagctggcaccagcaaggctccgagccctctgggcaatgatggcgtcgatcgggagatcggcgggtgggaaatggctgagaccgatccgactggcagtgtagtgaccactaccgcccaattcttgaatagcgtgaaccagggcgaacactcgaatcttaacgacttgcgtcagggacaaagattcggcggtgagcttgactattccgaaaacgaacttaatgatattttcagcaacatcgcctatctccagccagacgatatggagacgaacgttttcgtgggtgccgcaaatcgagctgtcctcgatgccgaggcctttgactcgatgaccgagccagcaaattctatgtcggacgacataggcgacatcgcggcatctcaacctccatctgccgatgttcagtcggcgttcatggctttcgatcatgcacgcacctcgtcttcctcgtcgtcacaccaaagctccgatacctcggctagtgacgcttttatcgcaacagatttcgacggagccagatcgaggacagatccatcaacttgccaatgtcgaggatccatcctccgcgttcttgctgagattgagtcgaacattttatccgccagtcccagcaacatgtacgctattttgtcatatctccgtcagacaacggcagcaagcaacgacatcttgacatgtcgcatctgcaactgcagattaaagttcttcggacttcttgggatcattggcgagaagatcaccagcctctcgggggcaataatcaccgcattcgtctgccgcctgaaggagcaaaatgagtctgtggatttcggcaagtccgattctcctgacaagcgtcttgatcccaacagggcaatacaattgtgcgagtttcaagtccagtctctgcaggaattcaaagtcgtatcagctgccgttattaagttgcagttgaagtattctgtggcctttgtctctcgcactcgtgagcttgcgatatccatgaatcatcttgcacaagctcagagccttgagaagcttgaaagcaggctgaacgagctcgtcatcaagatgcaacgaatggtctcggaagtagactcagacctttgtgatatatgaggcatctggggttgttgcaggagcctgggaggattgcaggctacagtggatgcctacagagcttacggagccttcagggcctatatgtaccgaatacctgtccattgtagagcttagatagtcagtcaatatttgcagttaattcagtcagtcattgcgagcataaagagatcactggtcatgccatcagatacctgaaacacagataatgagtgaaactgacggacaactgggtttacaaagataacacgtatccagaaattatgaaaagagtccgttacttctgtatctgcgaggcacctttccgtatccggtatctccccgacttctttacgaccgacacgctcgagaagggcatgttccgacataaggctgctcgaggccatcaattttatttgtcatcctcatggggcctagtaaaataacctggagtgcagcgcctggtaaaagcagtcgaccacaacccaaagatttccccaattccagagtacctacctagcacttctttgcatacccgcagtcatggatgcactcgaggctccagagctgcttttactaccccacctgtcggccttgacacccaagactggttttctgattggagtgagtacccagcattcgtcactcgcaaggcagttctgaaataaaatacagcttgctctcgctatcaccgcatactgctactatagacacacacaacatccactgtacaagttcccaggaccccgatcggccgcatggagcaacgtgctctactgttactactacatccaaggtcgacagcccttcaagttgctggagctgcacaaccaatatggaagcgttgttcggacggctccaaacgatctctcctttaacacggcaggtgcatttcgagatatttacaacttccggccgggccatgagacttttatcaagagcgactggtatgatgggggcgtctttgcagacaaagctcattcgatcgtgagcgagcgtgaacctggcaagcatgggcacatgcggaagtatctcagccacgccttttcggacaaatcgttgaaagcgcaagagccactcatcgatgaagttgtaaacgagtttgtctctcagcttgacgtgtttggttcgaaaaagggtggcatcgacattgttgtctggtttaatttagccacttttgatatcattggctccttggcatttggagagtcttttgggggcgtcaaatcaggtcagtgctccagacctcatacatcgcatctatactcatcattcacataggtgaggttcatccttggatttcgcgaatcatcacggcgatcgggcagagtgctttggcagatgccttcaagcggtttccaaaattcgcgaccacattcaagtggttattcccgaaagcaattgagaagatgctggaagacacggcaggccatgagaactataccatctcactgattgataagtatgcctccgaagcttcacagggctatccgtggaactctaacaccttgatttaggaggttgagcaatccatctactcgcccagacttcttgacgcgcatgctggaaaacagaccagaagatttgacagatgtccagatcgcggcccatgcgtctgactttgtcattgctggcagcgaaacgacagcgacaacattgagctgcatcgtatactatttgaccaagaacccatcagtatatcagaaagccacgcaggaaatccgagacaggttcgaaagattcgaggacatcaactcaacagcagcttcgcaactcaaatatcttcatgcattagctctcgaggcgatgcgaatctatccacctttgccgctggccttaccgcgagtcgttcccaaaggcggagataccatcgacggtcacttcgttgcagaaggggtaactacagatccatatccatttggtttgaaccttcctaattcaaaacagacaatcgtttccgtcaatcctgtagcagcttgtctatctacaaagaactttgatgcgccactggagttcagaccagagcggtggctcgaaagtgatttggtcgatgatcacgaggcctcgcagcctttctcgatgggacctcgagcatgcctcggaaggaatttggcatggatcgagttgagtctgttactctcgaaaatgctttgggtctacgatatcgagcttttaaacacagaagtcgattagttaagggattccagaatggcgatgctgtggaagaagccaaagctaatgatcaagactactcgtaggcgagttgcttcatgataataacaagattttcggacgccctaggacgtcctctaatatctgaacgatgctatacttagacatgaatatattaatgtaatagatagacatgctacaattggcttacaattcttagctgactagcgggaaggctatattaggccttgacaacttacaaacaagggaagttctgtagtattcaaacccattctctggatctgcggtgaatctaagggaaggtcagccttatatatatatgggaaggaattgccacctcagatgcagctaaactcactttagccaaagatttacagttccataatgtgaagtgttggtctgaggaagtcttttatctttctcctgaattgagtcctcctgtctatgggctctaggaatatagctattcctttcccgctgtaaacggcgtttcgtctcggcaatcttattgcgcttagcaaaaaagtcctttctgcctataattacgtgtggcgcgggtggaggcagggaatttatttaaagtaaaagaacgcgatattagatcaaggtaccaagtaaaaggtttttgaatagaaggtgtgtgaatgattatatactattgttagcacacattctacatttatatctgagattttgagctcaagccgctcttaattagaagataaaaggagataacatcctgaaacggatggagttcttcgctatttcctgcgcccctccgtcatgatgtattttcttgatgagataaagtgctccggaaaatgagggcagcagcaatgctatcagcgaactaaccatcacagtataaacgaccctgtgggggctaatcccttctgggtatagtctgaggtgggcatcagtgttgctcactgattggacactgagcactcactgagcatcagtcatcctgcacgtgactgatctgagcccgtgctgacatctacccagtgagcctgagcctgagccctcacaaaagcggcagctcaaataggaaagccccacccgccagggtatttccggtacgtatagctacatatatgaatttttgttcagtcgcttcacattctgtggtcaggaagcggcctcttctgtcattggccataccgggtgtctatcccagtcactcacctactgtaaaacatgcggatagggacgggtactgtaatttaagctggatgtatcgtgttggcttagaattgtcattttcattctgttttgaatggccatattccctgagaagtccgtggcactaggtatataattacgaacctttgggaaagtccgtcaaggaactaatcgcccgccattcctcaatcgctgccaaggtctcagatgcggccttgctgatctcatcgcaggcatcactccccaagggcaagagagcaggcaggggtttcccctcggcgactcccgtggaggtaatgacgtcgtagataacttgcgcgcccttcacggggttacccagctgggcgccgttaaaggcggcgaagttagagtcggtggtattgtttacctcctggtaggccgatagacgcgaggactttgcggtctgagaaatattggctgacgggttcagtaagtcggtgcggaagaagcccggttcgactaaacagtggcggataccgaacggggagatctcacccgccagcccaagtccaatccagcgcagagcggctttggaagcgttgtagagattgcagccaggcatagggtaccaggcggccatagagccgatggtaaccaaagtgcccgaccccttagcgcggaggtgtggcagtagggcgcggtaaaggttcagagggccaaaggtattagcctggaactgacgctgagtctcttctgcggtagcctcttcaagcatgcctgtctgcacgtaggcggcattgttgacaacaatgtcgaccgttccatagacagctaggatagtctcgactgctgcttggatctgggctgggggctcgttgtggtctaggtagacagccttgatattagggttagttgactcgagctcggctaatttatgcggagtccgtgtggcggccaacacgcgatccccgtgcttagcggccactttagccaactcttggccaagtccggacgaggtgccggtgatgagccagatccgggaggtagtagccatgatggatgggtagatgatttgttctcaaaggatggtattgaggtcaggaggggtgtgctgctgggaggaggggaggaggacatctatatatcatatgggccgatgccatccggtgcgagtactaaactccgctaactgcgaaacaaagatactggctccatcctaaactccggtaactacgaagcaaaaagagacttcttacatcctagtcaagttaacgtagcctgataggtaaaacgatgaaacgaagtgggttcgacaaaagtccatcagtcgatgctagaataagaggaaggtcgtccgagactattgcactaaccggaatcctgctggccccatagtagtagttatggcaactgggccaagacctacatattatacagtgtttgttgtatagtatcggagcgaaggatgcatgtctatcggctagtattcaaaccggcaaactagattagacagtatcaacgtgagagctcatcttaaagacaggcagtgctgtttcccggataccgtgaggacagtcaccgaaaaacaaaattatgatttctactgtttggttagagcgtcctgctcctctgcttaggaacagtaagcgcaggtacgttgatgagcgcccatccgtagatcgactctagtaaccaagtggcccgagcgccagcggggagagctccgaaccacaacgtccttccacccgtctcaattaatggcgagccgagatggcgctgacatcagtaagatgccgaaatttcatactgatggatcacagctgacagaagcaacagtggaaagcattcaacttcatcgacgtgtcgccggtgaagctaccagaggacagctcctcaatcttcgatgtaaggcctcgaccttcctctgctctagcccacggcgtatctaactgtcacccctagagcgacctctcgagtatctgcactggctccgcgaacctctttgttggcactaccgatggatttgtccacatcctctcctcggccttccgcgtcgtgcgatcgttcaaggctcacgataccggttccattacgcacatgcgacagataaacgataccgctctgctagtgaccgtcgcggaggatctttccaacgagccggttctgaaggtctgggctctagatacggagaaaaaagatggaggcccggggtgtctgtcaacggtctctgtacaaaatgccaggaggcagttcccggtatgtttggcatccgaagcgggaataaaatggtcaatacttacttataatggtatagatatcggctttcgcagccgtcgacgacctctcacaggtagcagtgggtttcgcgaacggatcggtgacgatcatccgaggcgatttaatccacgaccgaggcgcgcgacaacggatcgtattcgaatccgaggaacctattaccggactcgaaacccaaatcggcgctgtcacaaccctttacatttcaacaacgagtcgcatcttgacattggtcatcgccgggcgagggcagggccagcctgcgcgcgttttggaagatacgggctgtggcttgggctgcatgactctggataaagagggcggagatgttctaattgcccgggatgaggcgatctttacctacggtccgcgaggtcgtggtgcgagctatgcgttcgagggcccgaagacatctattgatgcttttcgtgactatgtggcgctcgtctgtccgcccaaggctgggactagcaagtccgatccgctaaggaaatacggtgctagtcccgccgaggaaatttttggcacgactacgttcacgcttctcgataccgacctcaagttcatcgcgcatagcgaagcgctggcgtcacctatgaaacgtattttcatggaatggggtgacttgtttcttcttacgacagatggaaaggtatgtgattgatatgatcttgtgttcgtctttcttctaaccggttctagatcttccgttatagggagaagaccctccagcaaaagctcgaaatcttatatgagcgcaatctctacatccttgctattaatcttgcgcaaaagattgggattgatccgctccaacagaatgctatctaccgcaagtatggtgactttttgtaccagcggggcgactatgataccgctatgcagcagtatctccgggccattgataatacagaaccttctcaggtcattcgcaaagtcagtgagaattgggattcggcattgttctcgtactaactttgatgtagtacctggacactcaacgtattcacaacttgatcgagtatcttgaagagctacacgaccatggccgtgccacggttgatcacacaacgcttcttttgaactgctacgcaaaactcaaagacacaagcaagctagactcgtttatcaaagctcctggtgagctgaagtttgatcttgaaactgccattgcaatgtgccgtcaaggcggatactatgagcaagcagcctaccttgcaacaaaacatggcgagaacgacatggtcgttgatattctaatcgaagattctaagaagtacgctgaggcagtggaatacatttggcggttggatgctgaagtggtatgtctaaactgcgtctgcgtcatcgggggaaacaagctaatatgtgctaggcctatcacaatttgatgaagtacgctcgagtattgctaacacattgccccgagcggacagcggagctgttcaaggtttactattctggccagtaccgaccacgcacggaggtagaacagaaaccagagccccaagaacagacgaccagcacagtgcaaagtcttgctgcccttcttcctttgcggtatatgactgttggcacacaacctacgcctgaaatccctgagccagcggcaaatgaagacaagattgagaattcgacgccagattatcacattcccaagccccgaacagctttctctgcatttgtggatcatcctaaagagttcatcgatttcctcgagaccttggtgcagcagccggacttgaagaaggacgccaaggttgatcttttcacaacactgtttgagatgtacctggacacagcaaaggggaaaaaggatgcaggcgaaagacaggaatgggagacaaaagccaagaaactaattgaagggaaagacgtaagctgtcccatcgcccattcatcgccttatatctaacccacctagattccgatctccacatccaacgtgcttctcctctccgatctgtcaaatttcaaggaaggatctacccttgttcgcgagcaagaaggtctccgcctggacattttccgttccttcacttcagcaaaggatacacagggcgccatcaaagcgctacgccggtacgggcctgacgagccccaactctacgtcgacgcattgacatacttcgcctcgagcccgaagatcctcgaagaagcaggcgacgagctagacacagtcctgcagcgcatcaaccaagacggcctcctctcaccattgcaagtgatacaagcgctcagcaacaacgcagtagtaacaatgggccgcgtgaagaagtacctcagcgacaacatcgaccgcgaacgcaaagaaatcaccaccgtaagctccttcaacaagcccctcctgttcagcgaatagtaaagctaacccccatcctttctagaaccgccggctcatcacaagctataaatccgaaaccgcaaccaaacagcaagaactagacaacctagccacccagccagtagtcttccaatctcgccgttgccaatcctgcggcggaaccctcgacctcccaacagtccactttctctgcagacactccttccatgagcgctgtctgaacaacctcgacgacaatgcgcagtgtcccgtctgcgcaccgaagaatgcgactctgcgcgcgatccgccaacggcaggttgattccgcggaccagcatgatttgttcaagggagagctgtctcgctcacgggatcgattcggggttgttagtgagttcttcgggaggggtataatgaggccgcagagtactatggagtaggatgggtggaatggattgcactttgtttagatacgcttgttctcattcttttcatgggcgtgttttatatggagctggttttcttcttttgatacctcgatctttgtcatttagatcaagttgtttctcctactggtgaaggtagtagatagtagatagaaataagcagttctttacacatgcaggtctttacgatagaacaactacttggaacaaagtactttggaggcaaaaactaggactatggattatgtccatgtaaagaaatcattgttcagttaaactcgcttcgctctagcaagtaacaacagcgagctaaggacaaaaaaggaattatatgaactcgataaaatgagcaagtcgatcacggtgatcaagcaaggtcattagatgcaaagagcaattaatatgcacagctgatgagataagaaaatacatgaatactgtcgaggcaaaagggtcgaagcaatagaaactgggtagatacatttccattattcactcgagtcggcaggagtgcgacaatgtctcctttgtatggccgaggacgacatattagagacgaaggataggatagacaagccaagtcgagattcttctatccgattgactcgttagagatcgatctcgcttaaagctcgcgtcccttctcgcctccccatgaaatacgcgggatgtgtcgggaggtagattgggagttggagccggatccagatccagatccagatccagaggactgttcagatggcttgtgtgtttcgccgggctggttgtttttcgtattctggcttgattggccagtctcgttctcttcaatgtctgagtcttcctccacgatggcattatcatccgaatctgagccatcgccattctcggactcctcaccttccacacctaaggcgtccagacggcgacgacgctcggctggggtctcgcctgtgtcgtcgtcagcctggcgtgggggcgcagtgagaccagcggcttgacggagacgcgaaggtgggatacgctctgtaccatcgtcgtcggaatctcggcgaggccggtcccgtatacggggtggcgcagggctgaagttgttgcggcgttcttgggcggcggaggtaccaacgccacgcgagaacctcgccagtgaggcggccacgttaggggaaccatgatggttgctagactcgtcgtcactaacgtcgctatcgctgatggactcggaatccatagcttcagtgtcttcttcggggatggtgttagcggcagggtggcgctcttgctttccctgggccttggcttcttccttggcttcgtgctgggccctttcttgaactggtgctggtgcgtcggtttgctgaaccagatcccggcgggccttggcgtcaagacccttcatctgctcgaagaattcctgcttgttcatacgtcggcccttgtggccaatgccttgagcgtcgacttgcggatcctgggccaacgtgaatcgaatgccgtcgtcggcggtccaatcgttatctttattcttttcgtggccagcctgggaagattcgccttcttcttccatgccgagccaggtccccatgcggttcaaaccacgtcgaacaggagcctctccagggacggtggtctccttctgggtcttctcacccttttcacccttcttgccgccaggaagggtataattcttgatcacctcaccgtcctcatcctcaacaataatagtgttgccgaattggtatgcatgagctgaacgaggtttgggcttttctttcttttcggtctctgccttctcctcttccgtggctcgaccctttccaagtccggtccacttggtccacttcttgagagcgtttccatatgacctaccaaccttctcctcgagctcatctccctcggtctttgtgtggggttgactctccgatgctgcaaattctcctgatttatctttttccagacgcttgcgttgcccttcaatgtggccagtcttctcttccggagacatatgagaggtatcctcagtcgagagaacattgccctcttcatcctcaatgaccatgtcgtggccctcttgataaacctctatctccggttcacgaccgaatcgatcgcgctcggcacgaggtggagaagctccacgctcagcctgatcgcgctgatcaagttcttgcttttcttcggcctcggcctcggcttcgtcctcggcgcgccgagaagcgggcataatagcagactggctaattgggcctccgccaccagcggcacgcttacggcgacgtctccgcaggggcttgcgacgagaagactcgaggttttgtgactcactatctccctcttcgtcacgttgccggcggaggaagttgccaggcatgccgatggggggcaaggtaccgggaggatactcaggaagcttttcgtccgatgaggcatctgtatcatccgtcttacggaaggacatggagcccttggcgattgactgcacacgaggaagacggttcatccatgaaggtccctcctcgttggcctgtgtgtaggatagggtgatagtcaaggtgttgatacgtttacccagagtgaaaactgcaatagacgaaccatgtactagaatagatgtgatgaccatgaatgtagtgatgggccagataagcctgacaacatagtaattgctggttcctggtattgggagctcgtcttcaggcgatggttgtgtgttgtcgttctccagctccgctcgagcgaggatggcggcgaaaatggcaccgacaccgataggaccgaaatgccctgcgaataaagcttctcgccaagttttgacgtccggtattattggcttgagcattagcataatgggaatacgtcggaagaagaggaccaatatcgcaatcaccaccagccgccaaggagtaaggccgagctcgggggagttgtagtcctcccagggaatgatggatccgaaatagacaaagtatgccaagttgagcagaagatcgataacgttggagacatgagattcctctgtcttctccgtaaaccaaccatcgttactgaatccaacaccacaagcgaatccgatcagcaggtcgtccatgcccagcaaagaaccagaaccagcacagaatacagccaacacaaagtagaatactaggaaactctcacgatcgatcaatcccttgcgctcagccaacttgatcgcatggcgagcaaaatagccgatggcgaagccgaaaatagcacccaagatacactcgtacaaaacggtgatacagaaccagtttagccacacctcgccgacttgaggacggaagtgatagatgtagaatgataggtagatgaatgggaaagccataccatcgttacacccggactccgcagataacaagtcacgcaaatgcttggggacacgcttggcgaactttcccttaccaacgactgacgacgccaagacaggatcggtagccgtgacacaggcagcacacaccagagactccagccagttcaggggaggcaccatccaccagataaacagactggtcattaaccaaccccacgtcatgacggggatcagcagcaaggtaaccgacttccaatggcgttccatgtaggcctttggcaactcaacgccgacggcgaaacattgcacgaccaggacaattcgcgagcactcgagagtgattttgtcgacgtttccccatttatgcggattgaacaaatcggccgcatgggggccgaaaatgataccacagagcgtggctacggtggcttcaccgatgtacagcttctccttgacgaacaaggagcacagcatgaacagggctgtgaaacctcccaggatcatgtaagccacatgcggcttatcgatgtccagatgatcccacgccatggtgaggatgtcggtgattgaacaccaattgtattatatccgggaacttttgtaatattccgtccgcttcgtaccgcaacgagcaaatttaccggatgatttccgccctcgaacttcgttggtctgcgtagctcttcatgccttggtgaatcagtgattgaacagccaagttgccgagccttgtagggctgaatgaggtaaggcgattcaagagcacgtccgatcggtttcgcggtgggtgacggtgcagattgtggggggtgcagactgtggccaagatcgtggggatgtcactggggcggaggcgaagctagataagaggttggagaaaaaaagaacccaggcttggcctcagggaagtcaggcacaggaagggggagaagaggagagagaaaagatttttctagacaggagcgaaattcggtaagagtcttgggagctcttggccaagcagaagaaagcgagtcaacgcgcgcttcgggagatttgcccagaaggaagtattcttggaaatggcgggattcgtcagccgagacattcaagacccacgttagaagcggaattggtcttggcttagcggaggactgaacgtgcaatagactaggatgtctataagggaatgaggaaaggtcctgattctctggagatatcggagaagaatagaaggagaagatcagataataatccgctgcatacggcatgtgtctctgatttcaccggaacagttgcaggcagtgtaagattcgggttctgtacggtaatggtattgtaacattaagatcggccagccctgtcaagtgccaagaccgaaactgggtcggtggcgtttctagcttgtgcgcagtgtatggatatggatagtctagtggggctcggggcacatttatgatatcggtctggagtggatactggtatggtatggtatatacagtacacttagtaaaataacttaccgataatccatatctgctatgaagtatggaatgtaggactgcccgtgtagagttagtatacagagtacatagtcaatatagtacacatatcttggaatattgaacagaagacaatcaaattgggaattgtgagtaaaataaggcaaatcaaacagttcaaggattgcaaactttcaggggaatttgatgccgagaacccaacatcgtaaaacacgcgcaaggattatttccggggaaatatggggagaaaaaaaaaagaaaaaaagcaaagattgcatcagtgggatgcagtatgcacaccgtgcactctgcgcgtaccccaaataagacagttgccagtccacccgcgggctgttatgtacgatgggctgtacgagtacgacctgtaaccacgcccaatgctgccctagctcgtcggcatcctctcaacttcgtcactcaagccacgccaattgtccgcctgcagttcggcgtacttgacacgctcctggctccagtcctgatgcagccggctgatgtgatactggcttcgctggaagtgaacgagttcgtcgcggatgcattctgtgatgaagacgccccgagcatgctgttgcacaatggattctttgtcctagtagacaatcaaggttagtattactgtaagtgccattgaaacatgagtctcaccttgaatatagagtcttcaaccttctcgatctcccctggtttgacggtgcccgagggtcgggcacgtagatcctgcagcttctgctcactagtctcaatgcgccgttccagctgcgcaatattgttccgtgcataccgatcccgccgatcgaacatttcacggacactgaccaagcaatcgcgttgctgctttagatcttctagaaccccctcgctccatcctcgagcttcgtcctccagcagactttggctggcagagagatgtcgagcggtcgctgtgatgcctgcattaagggccggaatgtcattggtatccactgcgtatgtgtctctggtgacttccgtcaaggactgcagggcgagtgagaaccggaggtggtcagcagccagaccatcatttcgcttagccaatcgctcaagtaaagtgcaaagactaatatagatttccgcagagcgcttgacaccactgcgaacggtttcgaacgtttcgttgagagtggcgggtaatgagtcctcgagatccggtgggaggacacggccaacaaattcgtcttggactgatattgtggcttgttttcgccacaccgaaagttcctggtttcacagttattgtctgtctcccaacaacccaaaaggtagcttactgttggaacggtcaaaaacatgatcacaagctgctcctgaccaagaacgggatggcgaacgagggcgttggtgaatcgaacaagtccgtgacggcgcttttcgaggaaagaggatgaatccgctgaaaggtgagtgccattgacttcataattgtgagtaagcgatgaggtgcgctaaactagcgttttgcatacctgaaacccgcttggggggaagaagaggcaattgccggaaaggaaatcgcttttggaggcagtccaatagccaaacaaaatcgctgtaacgccgaataaccgtgctacctctccgggcagacttaacctcataatttcggtgttgaaacataaacaagccttctttctcggggagcaacgtgacagttacggtctcctctacctgtgggtttgtcgaccggccgataccaagagaccgacgtcgtggtgtgatgtggcggggctcatcctctggaccaaaaccaccgagtgctggaggcaccgtgcccccaaagctgctttcatcgctcggacccgctccgctgaagtgattgttatcccatccagacccaagactgctaggctgtacagcctcggtctgaccattggaatgctcccgctgaaccacgttgctttgtgtggtgtcttcaatcgccttgctagtccacgcgttcgtagtggacctcacactgccgaatccattcgatacacgtggttcgatgcctccgcctgtctcatggccgtggccgtggtgcaattctggactgccccatggatctgactccaatccgcctaatgacgctcgtcgtaataacctttgcgattgtgcggagccgggggtttgcaagggagaggaatggtacgagggagtagcaggtcgctggtatggttgttcagagttcgcgtcgccagtctttcgtagtcggtcgaggtagccagcctttggctggggtagttctgcattaactctgcgttagagggattatcccgaataataaataaaaatatcaaagggcgcaaagtcaactcacttttgcggcgatcgtccactgcatcaaaggagagttcctcgccttcttgcgctaggcccaccatcgccaatagcacattgaactcgccacgaccgagtccattaaagctttcatgatcaccagaagcaacaaagttcaagattttgctttgatcagttgcagtgagcccgctgcttgagagaatctcccgcacagaggtcaacccaatgccagagccaaccctgtccccgctattcagaatcaagtcgtatgcgtctatatagctctcaggtacgtccgtattgggaagcaatgtccgagccagatcgcgccgggcagttcttttggcgatattgttttgggcattccaaggagaggagctgtcgtcgccgtcgtcatcggcgaacagcgaagagccgcccgtagccggctcgtcagcaaacagcgaggacttggacctcgcaggatcacccgcagagggatcctctggagatgtgccgaataaggacatcaggaaaccgacggggtggtggttgcgccaggagtgctgtcggggtcaggtgtggaggtgagggcgatgacgatattggcgatcaagcggagctcccgaggggggctggtcgcacgaatatacaagccactttcgacctcaaaaagaaaatcagtcctggagacactgcgattctcaaaaagctgagacgaaaagcgaattcagtgacgattcaagtccaacgaggtgagagagataacgggccccaatgtcactagtaccgtgcccaaccgagttagtcaggtcaggcgagttgtaccagctacaacccactacatacattgtgaaagttgaatttgggaagatattactttttccttcattctggtcctttgagattcgtctcattcaaatcaattaacgtcttgtaatatattctaaggcattggcgttatcggagatcaacatcgtgagagtaagggatgtctctcttgaacttgcacgtttcaacatcagtctatgaactttcgaattcaatcgttcaaggaggtcaatcaaaagagagaatcaggtctctatgacattgtggagctcgcagagaatgccgatacttctataccccgaagatatgatttgatttgcgtctcttatcgaacgaacatccaacatcggatggctgctccgatattggagcttcattgcaagaccccgtcactgctgtacagctccccactcggaagacccccccgatggctagtataccgaggcaatgtatgaatatcatatttaacagcttatctgccggggtgttgacaaattgatcttgctctaactaactaacattggccgaaacctgtgttcctctgttctcattccaacataatatgcgtcctgttactattactcgaggagcgaggctgaattgtctcaagcctcgcactctagatagatattcaaggcgatacttgaccatgctgaaccctcccaaattcgagaatgaaaagatggtgagcaatatcaaagtacataattgaactttgactgacacaaatcagctcaactacgccaaaggttctccagaaagagccgagttgaccaagacaatcaagaaactcaagggacaattcccgttcacaattcctatcactatcaatggctcagaggtatgttaaaaatcacggataccaacttgggacatgtaactcacgtatactagatcactactaaggaatcccgctcccaaccaaacccctcaaagcacagcgaaattgtcgcgaactacgcctctgctgccccagagcaggtcaacgcttccatcgatgcagccctcaacgcaaagcccgcatgggaagctacccccttcgaagatcgtgccgccatctttcttcgagcctccgagctcatcaccggcaaatatcgctcagaaatggtcgcagccacaatgcttggccaaggaaaaaacatatggcaagcagagatcgacgccgctgccgagacggccgatttcttccgccactatatccaagaggcatgggcgttgtactcccagcaacctagggtccaactcgatggaaactggaacaagatggagtatcgcccgctcgagggtttcacatacgccatttctccatttaacttcactgcactcggagcaacgcttattggacctgctgcattacttggaaatgtcgttatctggaagccttcggactcggcgcttcatgctagctggttgcttcatcaaattttgcttgaggccggtcttcctaaggatgttattcagtttttgcccggtgatgccgagcaaatcaccaacactatcctcaagagacctgagtttggtgccctaacatttattggagccactgctacgtttaagggtatacagaagaagatcggcgatggcattggtgccggtatctacaactcctatcctcgagtggtcggcgagaccggtggcaagaactggggcgtcgtccatccatctgcagatgtgagaagcgcggctttgaatacaattcgagcagcatttgaataccagggccaaaagtgttctgccaactcgcgtgtttacgttgcagagtctgtctggcccgagttccaaaaggtcctggcagaagagaccgcagctctcaaggtgggggatgtcgaagactatagtaatttcattaatccggttattcacgagcgttcatttgacaaactcaacaagttcatcgaggatgcaaagagcgactcggagctggaccttatcgttggcggaaaggcatctaaaacagagggctattacgtccatcctaccgtctatcgcacctccaacccccaccacaagattttgtccgaggagctgtttggacccattcttggcgtctatgtttacccagatgctgaatgggagcaaaccttgaagctggttgatacaacatctcgctatgcattgactgggagcatcttcgccaaggacccctatgtcagccggcaagcgcagactattctcaaacacgcggctggcatgctctatttgaatacaaagtgcaccggttctactgtggctcagcagccgtttggtggtagccgggactcgggtacaaatgacaagactggcactatggcacatctgcagcggttcgtgagcgctcgcacaatcaaggaagagtttgtgcctctcgaaaaagtcacatatccttcgaatgaggtttaaggagggaaaatttagatataatctatgacttcgaacgatataaattgaacttctgcatatctctacgctgtcttgaacatatatgttggcaataattcgacgctgatgcaacaacaataacaatacttcaatgtctttcgatattctttcgatatattttacgtatcattttacccccgtatgtaggtgagagtgaacatattccgatactaccgatgggactttcaaggtgaggtccggggctggaaagcgacttctgagaatcatcagatagcactgagttaacatcggaacgacatcaccgaagcaaattataaatgtacgcctgataacactgaaggtcaaatagtgcataatgaccatcactggccaaccccacttaggcacgtctatctatgaaacgtaacgcaaactaaaatacaacctcgaaccgggccggtgctggaacttgagcaataagactcacggagctgcctttctaccctatttacgatagcacaaatccccgcagaggcaacgatgagttggcatcgcgggacaggattccttgtccgggaacccctccttccatcggaggatgactccgatgcattaccggctgactatcagtgaccggatagttggttagatagtagcggtctgataaagtaatacagagatataagaagtggttgcttcaaaagtactctgcggtaccgacctagcttgaacggaagttattgctggcctgaactctttcatacaagacacaagcgcggcgctagactcacctgtctgcgttcttgactataaccaagatgttatctcgctctactcttataaaacctcctcatggtttatcggtccaagtctcaccgaacttagctcgtcgacttcattcgacaaaatctcacttccatgatgccgccatgccagcaatcaaaccgcccgtcgaagtctcatctatggcccgaatcccaacgaaactcttgctacggtctttgcttttgacttccttgatgacatccaagttattcttacaacctgccctagccgtgatgggcgtccttacgacatcgaaatcaccactattgaacccagatcagaacctccttctgaacaagtttcttcgctggacggtttataaccacttttgtgctggagtgaacagaaaggaagtctcgaagactgtggcagatatcaagaagatgggatatcaaggtgtcatattgggatattcgaaagagatagtgctggatcatgaggaaaagctctcgaccgacgaatatgggaaatcacaatacagcgacaagtgctatcagatgattgacgagtggaaggagggaacattggagacactgcgtatggttggtccaggtgacttccttgccgtgaagtaagtgtgaagccctagattcttgtcctatgggatctgatattcctttgctaggttgacaggtgccggtcctatttcagtgaacgcaatggcagcgcaaaagcctatgccagaggctatggtcaaagccgtggatgagatttgcattgcgacagaaaagcagggctcacgtctctggttggatgcagagcaacaagtcttgcaaaagggtcttgacgactgggcgattgaagtgatgcggaaacataacaaatcgcaaacaccaattatttataatactattcagggctacctcaagggatcaaaggtgaaccttgaccatcatcttaccttggctgcacaagagggctggactctgggtatcaagttggttcgaggggcatatattgagcatgaaacacgctctctcatccatgatacccaggttgatacagaccggtcctacgatctcattgcagacaccatgctttgccagagaatgcctgctggcaaggagaacctcccattccctaaggctgctcttttccttgccacacacaacgccgctagtgcaaccaaagcgattgccacgcaccaagataggcttctcgccaataaacctacagtcatgctggaatgtggacaaatccaaggcatggccgacgagctcagttgtgaacttgtgcaaaactacgaacgtgctctcgaacaatcatctgctgccaacttgactgcgccaaaagctttcaagtgcatgacttggggctcagtgtctgagtgtatgggatatctccatcggcgagcaatcgagaatcgcggggcagtggaacgaacgcagcacatggtgaccgcattgcgtcgtgagttgtggcgaaggatcgtcggatgagtcccgaagacattttagtggctaggtacttaatgcacaagatagcgaatcagactattgttactcaatatatccatgcgcagttcatgcacgaagccgaatagatcaaggcgaagtcaatcctgttagggtctcaccaatcatgtgatgggtcatgatagacggtgcgctgttatctccgataagtaaagtcggaagcgcatcccgacagattgaaccaactatctcgttcctaccccgcagcctgcaacaattgatatcggacagtcgccccggaagcatagactatcttcatacctattctatacagcatctcggcgtcctaatccggtatgcctataacacctagccaggcaagaacaaaaaagtgccagagggcgtaagtcatcttgatcaattggccccaaaatagaatacctaactcacattttataacaaagctgtgagcgatgtcgatcaatgaaggtcaaatgctcaggggtcagcccttgcacaagatgtgcgcggaagaagaagcattgtcactttccggtggaggaggcccgggtctccgtgtcggaacggtaagtagcgccaactagctgcactatacgtgctaatatagaactaggtacttgcgagagctagaggagcacatatccagaagcggaagctcggggcgacatggactcccggcaactcttgaacacagtctagggggtacactgtttacaggcgatgataatgttgatgttcctccgacccctcaagcatccagcacactgctagacaatcaagcagatattggatggcgttcaatgtcaatcggtatgctgtagccattctttcaatatgtgtctggtgtgttgatcatgggtcgttttcagggatggggccgtccctgcataccccagggacccctcaaagagatcatgagaccgacagtgaacaagacaatcaacgatcaaggttctctcgaaatcctttagtggaccgggatccatcgtttgcccaaacaccagatggccgattttgtgagtgttgagtctctcgtctcgctctctagctccttactgactgggatatcgaagggtatatggggccgacatcatcgtggtccttttgtcgtcgtgtccttgctttgataggaagaaaggtgccagaatcaaactgtccaccagatccatttcacattgatggtgtggctttcaggttgacctggcgaccatatcctcccgatgaagtacctgatgtcactaatctgccaccgttggactatgcactcttcttattcaacacagtcaagttctatttcggctttctttcttttatgattgatgaacatgcttatttgcaggatctccatgaattctaccgggacccaccagcgaaagctgcttcgaacagaccttggtactgtcaatacttacttgttcttgcattcggaaaagcattcttgacgcagaagaattcttctggaacaccgcctggtcatcaatacgcatctcgggccatggcactgttacctgatttgtcaggagttgacgaagatcccttgggttgtatacaagcacttagcttaggggcagtatatcttcagtcaatagatatgcgaagagcagctttccaacatgttggtttcttcatctctcactggtactgaagtatctaattatgtgaacagattgggcatgccttacgaggctgtatcatcgaaggaatacacagacatgtacccgaagatatatgtggaccggagctctccaaacgatgcagaacaatattttgggtggtttatatgttggaccgagaattttctgctttgattggcgccccaagttcaatcagagatgaagatatcacagttaaactgccagcagagatggatgattcggtagaacagattaatttgacattgcatgttcggctttcccggcttatggccactattctgacaagtgagtcttttggctgattaggttggatgcagtgctaacgaaatctagccgtctacggggttggaaacgattccgatgacaccctcgttcgaagcacacagtccattcttcatagcatggccgaactctcatacgacctgactgcctttttaaatgctcattttcacgggttaattagccgcgcttcgaagatggcgatccgattgatgttagcccatcatcatgtgggttttttccgaactactaatctcaacatgaactaacagcagcagtgtattgtacttacaacaagaccgctagtgatgtgcgcacttcacatgcacattgaacgaacagagagacaaaaatcccaaacgatcgtgttagcaccgcctgttgcatccctcttacaatgctgcgccgattccgcccagactatcctccagacccttcgtactttagctgatgatgacttgatgggtatgaatttactagctgttttgaatcacattaatactaattccaacatacagacgcattcttaccattccaaattgaagacgcatcgtcctctgcctttgttctctacctgatccgcgcgattgccccatcggtgatctcgaacgatacttggtgtgacaacctagctttagtgctcgataaactcattgcaaagggtaatctagctgcaccacttcgcaggcttgaactcaagcaattagagcaaatactcgcacctttgacgccaaaattggcaaatcattctttgccgcaagctaacctggatgaatataatgaaattaatgaggaaccctatagcttcgatcacgaggagtttgagtgggatctactgggactcaattcatcagtcagtctcccaccgcgggaattattggatcttgcagatcaattagacgtggaggggatcatgcaatctgttggggtttgatgtcttgcaatgatctaataaactatacgacttttcacaagaattcatgaagttcaaaattgcagaacaagcagagtctgttcttttcgtacgcgaagcgaatttggtctagtttacgacagtcggagggtccttgttattgatatttgtcagaatcaaggacgaaaaaatgacggtattcatcctagattctgacaatattgcaactagaaacttccttgttgactccgtcctttcgatcttatcgtgaaattgtcggaagactcacccgacgtttcttcagtatctcaaaagacatatcaaatagttgaaacaagcatcacggtcgcatttaatcttgttgatctacaaattctttttattcctctataatgtctcgtaccagaacaattggctgctttatattcaaccagtatgtcaacctttgctcgcaagcccggccagtatctaatttgactccaggacttggaattttactccgatcttacctcgcattgggtgccattcattgcaccaactgagaatgagttcctcagcaacggccgtggcatcagatgctgaaaccgcaacggcacaaaaaaactaccaagtagtccaagacactggcaatttcgacgagatccaagccaaacgcccagactttgatcattctaagcccatcgaagtaacaaaatcgccaaatcccaactgggagtatgggcaaggggtacccgacaatggagccagccggacgcaaaaacatcatgaaatcgacccttacgcttcagatcgcccgatgattaacaactaccgcctccttgtctcggggattgcgcctcgaccggtagggtttctgagcaccgtcaattccaagggtcaaaagaacctctccccatttagttacttccaagtcatcgaccacgatcccccgatgttcattgtggggttctcgtctcgacccggtcgagtcaaagacacctaccgcaacctccaagagaccggggagtgtgtgatcaacacggtgtcggagaacatgatcgaagcagtgaacgcaagctctatcgatgctccatatggcgtgtcagaatgggatataaccggtctacatgaggcgccatcgagtactgtaaagccatctcgcgtcgccgagtcggtgttcaacatcgaaggcaaggtggttgatatcaaggagttcacggatcaccaacagcctggcatgagccttgcagctactgttctcattaaggctacccggttctgggtcaaggagggcacggccaatgaggattatagtcacattgacttggagaagttgcggccggttggtcaacttgggggaatctcttatggtcggattgcgtcgacttttgagcacccgcgaaagaagtggggtgatgaggtgccgaagagtgagatcttggctaagctagatgctgctaggcctcttgaggaatgagagatcatattggtgcctgaggtgctattgctagcgttgtgtctcaggtgccagcgcctaggcatagttaactaatttcctacacagtcaaacaaagcagacttcgaagagtgttccctggtctttatataatagcatatatgttaactatatatactactattaattaacatcaaagatgttaacggcacgtagaatgagggatgtaaccccatattttaaccagaaaccaatatcagccacccccttttaatctcttcgtcgggacgaatcaacttcttcaattcgtacggagaactccgcacatcgaatagggttataagaagcggtacacaatctggaacaccagcccgtttggtttgtttctgtttttcttctctaagacattgtgtgattcacttattattcacttacttggagatttctcgcacacactcctttatatcccttctgatctgagaacccccttcactctttttatttcctggttctcatcaaatacattctttaactttgactataaccgaccaccatgctccccacactccttaccgtctttcgtcgcgactgcaatggcgacgaaaccatgtccagctgcacaaagcccaccagctcagcaataaccgttggcattcccgccgcgatatcaggggtgtaagtccattgatatacttatactatcgcccattcccaaccatggcagaactaactatatatcagtctccttatagtcgccattatcgtcctggtagtcctataccacaagcgcatacgtcgcgatgaccgcgaagacctagaagatcgccagcgcagctctggcttctatgctcgctacgcaacacagagatttggcacggagggaggaccaccaccatcgaaaggaggtgcctatgcttctgagtcgcggcgcagctctgccgattcaatctttgatttcaagcaggatcacggcccctatcaccttgctcagttcccgaatcctgaggtgccgaagccggtggctgctcgggtcgcttcgtagtcagtgcggggtttgatctgcttcttgctgtaagtcttgatggtttgatatgaccaacctggagttgggtgctgacttgcgttaggttcctgcgggtcaggacggtttcttcgattttcggcgcttcttcttatgggcgaacctgcttgtttccaaggttcttttgtccaatgtatgtaattttatgactttcgagcgatctgaagccataacgtaatagcgaatatttttttttcccactttacacaatattcacggcgggttggaacgatgtagataaatgtctgtgttcgaaagctaagactggtataaacagtaagtcaatagtacatttgtagatactgaaatcattttcataaataatacattggtcgtgcacaagacacgagaccaatcactcggcattctctatgacctggtcctccaagacttggtcactgcgctcgggggatggctcgaccgcaggttggacatggaaataccccatttggaacaagacattctgccattctggccctgcggtggcttgcactttgtagtaaggcgtgtccgtagcgaaccacctctctttgcgcgttgaggctttgtcgcctccttcgagggctgcacgactagcacgtgtcgtgcgggaacgcttctcgccgcgcccgttctcctgcgccgtgagtgcaaacagtctctcgcggtattgctggaggcggccgtcgaagaccatgatgccacggatatacggagccaagtcttccgtgatcggtgcgagtccattttcgaatgagggggcgtggcgggcggttggtgtagggtttgaatagttggcacgcatgataggttcaaagatgcgttggaattgagggagggtcgatggaggggtctgcgggggcattgcagaaatgatggctttgttcaagagtcgggtcgcatatgaagatgccagatcctcggtatttggaggacggaatgttctacttatcaatgcatcgaaggtagtgccgacggcttcactgaatgatgaatactccgttcgcagctctgtgtgcaggagtgggtaatcgtcaacatagttggatttatagccttctggcggtggtggggcggatatatcaatagcatcctattcaatgattagctggcgtttctgtggacttatcgatcaaacttacattgctcgcgtccgtggaaatattggagcaaaggatgtcgagagagcttctcatatcatagtagtttgcttcccggaacaacatgtcaagttgcgttgtcttggaaagagactgaaattgaccaggggacagaatttcaacttcattcttcccagccatgtcttcagaatcttgcaggctcaggccccacgattgaagactgttgtgaatgatttccgtctcttcatccaacgaaccttgggccacaataatatcacgattgagccagcccatatatcgctcgtatgtgttgaggctcagaacccggagtcgatccccatcatgatccacgtttgagccaggtggccaaataggaagtagccaatccaaacccgctttctcgctaccaacacccatctggcaccagaagtttaaattcatcagtgacttccgaagatccaatccggatccttgataaagtctggtaacggcctctctctttaaaatatgcccctcgttggcggcaaccaacagcaagtaatcgacgctgaattcgggagcaggcttttggtatcgtagtatggcatgaagggacatatcctgggtagggactaaactctcattgttgcaggtgatgacgatgggccgtttagattggctaataagagtcaggacaccactccaaaattgacgatcttcttcaaaaagaatatcgacttcttcaagcaggatcaaagattgtttttgctcccgggggcgtttgggtgcagtttcaggcttagggctaggttcgccagaccgggagaccggcttgctggaatttgaggatgagcctttgaaaaagctcttcagcttgttttgcttggcgaaatctttgttgtctgttgaattttcggattcgttgaggagatgaacaagatgattttgcgtcatatctccgacgcgttctagcatatcccgggcacttcgtcggcttccagcatttatctcgaaaacttcgaaatcaagttcttttgcaacagcatagacagaagcggttttgccggagccagccggaccgctaagaagaatcgcattggacattggattctttctttctactccaggtaaaccaggtgctatgtcgcccgaccggacgactgtccttcgaggtgttgtggtcacgccgcccgctaactcatcatctgagccagagagacagtccatctcagagatctcatcttcgcttgatacaatgaaaccatcgagtttatcggttttttggcgcttcttcgcctttctttcccgcttcaatttcgcttttgtattctcctttgatgattttccggtatccactgctgtgattttgagatgccgtagccagtctcgaagcacctgtggttcacggccaagctgaaggacgtcttcagctgactcgggggcgtatttgtgtgtccaaagctgtggttcgtaggttgcacaatcaaaagccgaaactgatgtgagtagtcccgatcgaagtttggcaagagggggactagcagaatcccaaggaaatttgccgtttggcgaggaccacgacatttgtctttccattgccgtatgcaagacttgactgctggcaacatgtcgtatgggatgtcgaagaatagccagggcatcgtagtcctgtttagacaggcgggcgatcctgcttgcttcagccgttccagctagaaggacgttttcgtcatctctaattgagatagctgcaatcttcgatttttttcggtcctgggcagtatgccagatacggtcatcaacatctgaaggtgagtgagcgtctctaacgtgcacgagatcctgcggtggccaaaggggatcaagcagttcgggaaacttagaaacacgacggggaaagctagtaaaggagcttcccgaagctgcaactacccgcttcttatctggtgccccagctgtagtttggcttgagggcacgctcacgctgctatctggattgtccgattgagatccattcaagctctcgggcccggatttttgtgctgatttcttgctgaaaaacgggtgtgtgggctttcggggttggctttccttcttgcacggcttaacggatggtatagtggcagggggcttttgaacggttcgactatcttggatatcatcgatcaactttccgatgttcttttctgtggcaacactatactttatcgtcaccaccttgcgctcagcttttcgcggcttccttcgcttccctgtaattcccttttttttcgcctcttgatgaggactggaggtgggtgacgacagcagccctccctttgaattcaatttgagaatcttctgccttgcagaggttcttgcacctcggccctttggtttctcgttctcggatggtgtcaatgattgagtttcatcttcaacaagttgggtctccaccagcggaccgtcgggtggaggtgtagacacattgatttcggtctcgggaggattatcggttgataaaggcgtattgttggtcacattataaccgagccattctgccagacctgaattggaaatggtagtggatccggttgtttgaattttgttcgttcttcgtctctttctccggtgttcattcaggtcttcgtcaagatccgcagaactctcattgtttatgttggagacatttgaattgtagttccccgggacctgaagcccctcctcgtgcgtggagctttggctgcttatcggtcgaggatcgtgtacgtgggaattcacaggcaagattggctcattcgagggtgtagatttgaccgagacaccaaattctagacattgtaagctcagagtcacctgtagctataggacacatcctgaccttgtcggaagaagggatgtatgacttgctcttcgtcggttcccatagccatcggtagatttgatatgatgctcatgtgaacagtcagttgatccctgaggagaggccagggagcaagcggtatctcagaaatagcattgaaatgacagaattttggtggtaagtgtggtgcgattgcatgaagcaagaactaagtcaaggccgatctccatagcttcagacacgtccgacgcgaagggcgcgttaattgcttatgtcaggctgactgccgcacgtaccaacgctagccctgatatggcttaggggtggatataccggcccgacgtaatcccgaaaatttttcagatttccaaattggatgggtctgcatggaaaagatcacacgctttgagggacaggaacttaagtcattttaaattcctggtattccgttcgtcatggatttgcagtccccatctgtcctggcgcaattgcctcggccccttcacgcttctactggcaaaacccgcgtcggggatgtcttcagtctcgccgatgcgaaaaaacgcaaacgctatgaagtcgcagttgccgtagatggcgaggctgtgaacatttacaacgtatgcttgctcattatccaatgctccctcagttgcatctgacactaatctttatcaggttcaaacacctaagctcgtgacttcctacgccgtcccaccgcaatctactttctcttgccgcccatgttcagttcgcaggaagctgtcaaaaaaatcaacagtccgaagacagacttatactgctgtcacgaaacccgaacatcagatcaagtgctttgtggaggagatcggcagcagcggctcaagtgctccggtcatttcttcttcgactaccaccgtgaccgactcgaccagccccactacttttgtgggaattgtgccctctagtaccgatgccgaaggagagacggatccatttgatatattggctgtccacgaggatggtcgtgtgcgtagactgtcgtcggatttaaaaacccaacgatggagtattcagcacagtgagattgcaaaggtttgctctactcacaatgttcaatccagcttcttggttgaatttgatgatgcaaagaaggctttgttcaaaagacgacaggatttggcattgctggcgctgggcgatctgacaacctcaggaaccaacgagccgtctatcttgcttctggtatcccaaccgaagaataccgatcgagtctccctcaaagacatcattgtgcagatgttctcagtccccgcgcatgcgaagtcagagtcagggttggacgaaagtcagcgcctacgccatctacaaactttccacatcccggatgtgagtggcctagaagccaccaatggcaatgctatgcaatggagcttccattctggctcagcaggattgagcctttctttcgaaaagggtttcatcaacgttgacctctcccagtactctccctgtgtcacatcgcaattcgtccttgaagatgaggaattctcctcggtcatgcgcatttctccccaatctgtgattggagcccaaaaatctcttgtggcggtatatgatactcagtaccattctgtgcagcgcagcattccagccggtgatcttttgtcaagcactgggtcgaccccagaggctcccacaaacttcatcagctacttcgccaaacttgggattgctatcgcaaccaagggcaatacccttattgcttttgacttgagctctctccctagtgcgcccagctcttcgctgaagcggaccagagatagcctgctcatcgatgctatcgggagaggtattggttcttctggtgcacagtgggatatctcatcaaagaagcaccgatctgacaacatggcctctcttcggcttacatcaccggagcaagttgagaaatggacacagctcacaaaaacggtggagaaggcgaccaagacgaagaacattgacttgtttgataatgcggtcctgacctacttcagcacatcggatgcctcaacgacgctcccagtgcgcgggcagtatgttaaccccgaagcaactcttttcttgctgtccaaaatattcgctgtggaggagtctgccacagatgatacaatgtcggcctccccttcatctcaactccgtgttgccatgtggcccccgactacttgtgactggcttattcgcttgggacatctgtcactcgacaatgttgagattgcgctccgtcgtgcatgcaagccacgcattttgcagccattccccaccggctcgttcatccaggctctcctcgattcagatccctccttgaagcaggtcaaccaagtgcttgagggaccaactctgatttcctccgatgagttggcctacgcgctcaaagccttcttgaaccaggcacgctcgcactctggaactctcgaggaaacagctcgtgcgatcacaaacggtgatcttgccactcccacccaggaactttctagacagctaggggccgaaacggcaaccctaaaggatatattcgctggcctgaatacctcccttcaaaagattcactcgcagcccgtgtcggttgtcgttcattccctccgctccaatctctcgcggacagaacttatttctatggttcaccatctccgtctttccctcgctactggaggctacacttctcggttcactgaaaaccccccaacacctattactctcgaccaaattactcccactctttctctcgatgtcatcattgatctcatcactgcctctgtggatgccgtgggtccatccggttggatctcggccgtccccgcagcgggtgactttgaggactcagtcgctgccgctgctagccgtgaaatggaattgattgcggacatgaagtctgaagtctccgccgcgcttgcaggagtggaagaggcaacctatctcaagggtgtcttgtgcgagtacctccgcttcgcggatcaagttgacacccccgctactacctccgaggatgccctggccaagatggattccgaggccggtccatcgcacctggtccgctacgagaaactcaatggcgccgacttgcttgtcttcacccgtcccggcgagggagaggacggctacgatggcgatgctggtggcaaaatgctaccgctgtcactcaaagctgcttccaatgacgtgtcccgcactaagattaaaaaatccacgggcgaggtgaagcatcgcagcagtcgtgagattggttacttgcgccgcaaggcggttggcaagtactcattcgagagactgattatttaagagcatgtgcattccatattttttactgtaaaattcattcttgagggagacaatatcctaggagttagacagaacaatacatatgtgggttcccacgtatttcaattcttcatttttttttcttttttgggcaatcaaggacttctcgcccttgcgcgtgttaaaaatgtttcgacgatactattggagccagcacaatgaaattctcgagggtcaatgtatttggctgtttttggtagttggcgatctaccttgggagccttgcagctatatataagtgggaccgaggacgaaggattcatccagcactgagaaaagaagatcttttctaccgatccattgaataacattaagaacatcactaaatattacatagaatagaaaataggatcaactcaactaacgcttgtttaccttaaataaagaacaaaacagaactaagtgggactagtcaacctgttaagctacaaagggattcaatagtctagctcggatctgggggtttagagatattcttgtcccaggccagaagacaatagtggaactagggttaaatacagttgatagatctcaaaacgtctatactagtttatattattgctttctatagaatatcaatctgggcgggaggccaaaaaaggtaaacaagaaagataataaacaagggagagctctgagtggagataccctggacaccgcatctccgcactgttcaacccaccgttcaacccaccgttcttctcattccgagcaaagattagctctgatctatacgttttcatgtcgttggtgtcgatgtgaagttggtttggatccggaacgcgtaccggcatcaaaacaaagaaaaatgagtaaccaaccatggcttgacagtttgtcggacgactggccatctctagcgcccaacagtcctgtacctgttcctgccttaccggagtcgcctaaaaccagccagcagggaactcctagtcgcattcctatgcccgcgcggcgttcccaagaacaacaatcaccgggaagcaacaaaaaggacaaggttacccgaccatgtcatttccatagaagagaacctccgacgccgaagaccccccaaccattcaaaacacgcaaaccacgatcgcctgcccctggtagtttgaaatacagccctcccaagaccaccccagggccctacgccaaggaaaatctcaaggccagccccaagccgacgggtcgcagacagccctcaatggatgcgcgctcccctctacgatcggtttcaaacgcctccagagcctcctccacaacttccgaattcgacggtacggttcagatcaaatcgaagggcaaggacgcaaaagagggtaccccggaatggcgcagacgactagtgcgcggggaaatcgctgctggcgagcaacgcgacctgttcgcgccgataggtctcgaaaccgtgttcaagccgcccacaccccgtgctgaaacggaaacggcacaacaggcctctactccctttacgaaacaggacgacaatctgtgggatttcgccggtacatcttcgcgacaaaatagagacgaacataacagtcgcgaggatgatctcgaacgcgtcgccaatgaggatgtaagggaccatggcgaccagtcgccggaaggaacggtcaatcgcgctccttgggagaagaatgggggcctggacgtggattgggatcaggaagggctctcacaatcggggaatacacaactacggactgctagtgggttggaagatctgcgcaatgaaggaatcacacccataaccttctcccgcaataacactgttgatggcaatgggacttcggaagtcatcaagtccgcgctgaagcaggtcaccaacaagttggaaagcctgtctatcgaaaatgatagtcgcccggactccgctgcaagcgatagcttcctcttttacaaccacagtgaacctaatgcggacgggtctccacgagatgacagcttgctggacgcgacaagtcattctctaccccgggatctgtctatggggacgatggacttcagcagtcggcgaaaaaaccgctccttccctcggcgattctccccttcgccctttccttcccaccgtttgtcccccatcaccctcgccaactctaaaatccgcagttcacctctgttcaacccccctcacaagaccacgtcacctggtctaccgcatccttcctcgtctcatgtccggccggccacggctggagcagagaatgaggccaaaatgccgtcatcaggaagtccattgaagctgttcggtgaccatgacacattcactaataacagacttctccggcgcatgagccagtttgaagacaatttcagtgacacatcagaaggagatgagcccccttcgccctcggaggaagcgcgacgaaaaggcgagagccgcagctttttaaattcgagacacgagccattgcaggagatctcccctcggcgaaacgaacgtcttggatctcgcaatgctgtaaatcgaatcaaccaatttgggggtggcgagttggatacatttgatttctcagacactagcccctacgagcacaaattggtgtacgatgaggccggagggtttgggtcccgcccatcttcacgcaagcgatcgtcagcccggcaacaatatctccgtggcccctcacagcaaggattgtatcattacagcagatcagcgagctcaggattcactaggaaaccatctgcctggatgcgccaggatttctttgatgatgtgcgacacgggaatcggcccaataacaaggaaaatatggcccttgatgtcaagcgagtgccccgggcccccggcatggatcccacaccaaaacggcgccggacaatcatgagaaataatagctccgaacccaaacagaatgccggcggttcatctcagaagtatggcgacatgtcgctgttgcaacgaagtcttatgcaacacggtgtacagctcgacaatagtgactaccttgctccaccaggcccttctcactcaatgcagcgacctcgaacacctacaccaagccaaatacgaacagagggcgaaagccatatttcactgcacagagatttctccgaatccaatttcgacaataatgattattctgattctttttcccttgatggtgacgttccaatagtgaagattactgggaccagcgatacctcacgaaaaggatctatcaccactcaggattatttaaacgaagccactaagatcatggatctcatcagatccaaaggacgaggcgcagctggattgtcaagtctgcatgagtctgacgtggaaagtgaaggcgacgacttcagcgacgacgacgaatccacccgggaagcgttttctcgccctccgagccgcgacggaacggatcttcgcaagttgagagaggtgaaggaggtgaatccaatgatcctgagtcacctgaaaaaataccaggaacaagatgacccgaatgaccgagaaatgtccctgcatgctcgccatggccaggacgagggccaaaccgagatcggtgaatccaactcacagctcatccgattacatggaccgaggaaacgaaagactagtggcatgactgatgacacggcggaaaacatcgcccatgatctgatgactatcaacacacaaatgtccgggttcagcgccacctccgtacccacgggctcttcacaaggttcccacgtcaagggtatgctggcttctgatcttgtagcccacctgatcccgaatgaggttaatggcttcaagtatgaccgatcgaagaatcaatgggtgaaagatgaggcagaagaaccacatgcaccaatctccgaacccgcctcggaggctgatgatccattcaaagatattccggatctcactgtagacgagctccaggagatgttgagagtccagggtctcaattctcctacaaagaccgacgtcccaaccgagcgagagcaaaccaaggcccgcagtcctttggctgcgaacacatccccgaagaaacccgatgttcgaccacacaccagggatggagaaccttctcttggtgcaagctcggttcaatcaagattcactcgcttcacgtccagtgttcctaacacggggacaagagctacatcatggggcacagacgaagccgcagaaaggaaaatctccgagcaaggaaaacttgaagctcagcgcgacgagccattgtcctcgaagaatccccgatctctagggaaacaagcgcgtgtcgcaacagtgaatctctcatcgcccctttcgcgcccctcttctcggggtgagcctgataatggccagtccgacccgaccgcgaatcacacctaccacggaattgtgccagtcgaggattcagccccagcggaccacgaaaatggatcaacacggttatccgttcctcccacggggcgtcaaacttcagttggtggccagccgtttattcgacgtcctatctcgaggattgaggagagaaacgaggagaccgtcaatgaccaaagccttgtgcgcaggaatgactcacttggtgtccgaaagacaccagccagaaccgaggcagagcattctttgatacctctccaaagtgccgggcctgacacgagctacagcttccacctcagtccacttgcggactttaccgtccaccaagctgataaacccctgaaccttgaaatgagctatgtggctcatcgtacaaacccttcctctttgcgacaagtgcacgggactttcgcattggcaactgaagatttgatcaagcatattactgacgtggaaccatatgagccttattgggaacacgtgcgccgccttgtcttgcgcaataagggtttgattacgttgcacaagctgaacgaattctgtccccgcctggaagagttggatgttactgataacgacattggtcaattgagtggcatcccctcaaccctgagaaccctcaagatccctcgaaattgcctctccaaccttactccatggggtcacatgatcaatttgcagtatttggacgtttcaggaaatgatatcgagacgttggatggcttcgcaagtttgattcatctccgggaactgaaggccaatgacaatcagatccgcaacatagacgggattatttatcttaatggtttgctaagcctgaagctgagcaacaactctatcactactgtggatttcgaagggtccgagttgacacgccttcgtgatcttgacttgagccacaactgtctaacatctgtccggaatgtcgaatggcttccgtcacttgccactctcgatgttagtgccaatcagatcagcggctttgactcgtctgcttcccttattagtctccgcgccctgcgactctctgaaaatagattggaggctttagatgcacgagctttcccttccgtgagccttctctaccttgatcaaaaccacctttctaccgttattggccttgagaattgtcacaatctcgaggtactgtctctccgagagcagacagcgtccaaagaagcgtctaaagaaaagaaaattgaacacaggttagatattgacttgggacttgtcaaggatgttcgcaaagtctttttgtcttcgaacaagctttccgaccaaagtgtctgcccttctgctccgctactacgacttcaacttctcgatctagctgcatgcacattgaagagtctcccgggtgattttgctttaagcttcccgaaccttaaagtcctaaatctgaatttcaactcggttgatgatgtggagccactgattggaatgaactgccttgctagactgatgatcgttggcaatcgtctctcaaggatgagaagaatctgtcagattctcagtcgactaggaaaaaccggaaaaggaactgcatgttctttgcgcaagcttgatatccgtgggaacccgctaactgttggcttttaccccccagcggtgactgggagtggcaattcggatcgcaagaaattgaagtcgcaagaacaagcagtcgtccgacaccaagggacccaccgggacctttctgatgctctagctgatctggggaacgatgaccagagctctcaccgtgccaccgtgggcgatcagccgacagacagagaccccgaagtcgacgacccatacacacttccgttcgctgacccgcaagcggatgtgaagtacttaacgcacctcgatcagtccacacgtctacgccgaagagtgctagagctcttgctctacgccggcacgagtggctctctccacaccctcgacggactagaccttcggccctcgctgggcgacgagtcctccgacatgaacaaggcgtgggacagattggagaatcttggtgtattgcggaggaaagcgatcaaaaattaggctatattctttgttattcttctatcgagtttttttccccatcatgcgaaaagcgcgcgtgatttgagcattgctggcggcgtgcatggagttttgttgtttctcgagttggaattagccttttatgtttgtacagcatcagcgcatcaccggagttggatatcgaatcaattctggcattttagcatttcttattgttgcaagctgttcgggctttttgtcttattgtggtacgccataatagaatgagatagagccccatgcttgatctacgtcagaacttgtctcgctgtgtggtgaccttgtcttacggcctatacagaaataagcttacaattgccccgaatttggctatgcaagcccccaggtagtaagctcattctcagacagcaatcgatatctctcttcttctagtagcacagctccccgagtgatatgattttactagagcagtggggctctgtggggttcgggccgacccgatgaaaggattgcaaggacttcctggtggctaattaccaggaacagtccacttggcgggcgcgcgatattaaatactctggaggtattcaaaaatttgaagaagcctgggatgttggaataacaatgtgttagtaaggaccgaggtctcttgtattgcgaaaaaattaaggatgaaatttagtaaaaatagaaagaaaaatacatagaagtatataatccagcgtatgtagcttaataacagaagtcctgctatataggctgccaggtcaggtccggacaccacaatccgaggacgtcaaattatttcttgccctgaacaagaagttgcttctgcttcttgatatgcttgaccacttcgatatcgatcttcaagacgttggcaacagtatcagcaggagtcaacgccagccactgggccagggagatatcagcgacgcggtcgctcttgtagagctcgatccacacgagtttctcggtctcggaggtgttctcgatatagtgtccttttaaagagatttagcatattgactcggtattgggaaaatggagaagtatacttaccactgttgtcggggaaaacaccggtgtcacccgcgtggaagtcgaaggtgcgagccttggagtcaccaatgaacactgtagcacgggcttgaccctggtggaagtagagccattcctcagcctagatggtggttaatataggtttcttctcaggcacttgtgtgttgtgtaaaaacttacattaggatgccagtgaagctcacgaagacccttgggctccagttccacaatcgaagcagcaagagtctttgagatggggaagttggtggaatcaatcttgcggagtgttccgccgtgaccagggacaggctcagaggggtgcttgtaggtgtggtagacgtaggaattgtcacctctcaacgtaccctcgggagccttgtcaaggtctttgctgacagtgccgttgaggatgtaagggaactttgaagggaccgagtcgaaaaccttagggtcaacaccaaagttcttggcgagaatgtccctgggggtatgggcaatccagtcgtcaaccatgaaggtagtactttttaattagtatattgagttttcaaaagtgtgaatggagcatacccaatcttctcaaagtcaccatcatcaaaagcgaggaggtactcgttctcatcgtctagaccctgcacgttatgcgcgacacccttagggaaataccagatatcaccggtttcaagaacctcggtagtgaagccgccgttttcatcaacaccggacagcaggagcgagccgttgtagacaaatccccactcggcctgtgtcctaaagtaagtcaaatgtcgtagaaagtatatatgtgcggccactaaccgtgcggtgccagtgtagttcgcggatggcgcccttcttcagatgctgttgggcacctgcgatgtcatggctctgtggcagatcctgaatgacttgctctcgagaccagccgcctgggaaaagccgagtctgagactcagagaagctccacttgacgttgggcacaaagccattatcggtactggcagtgcggaactggtctgggttttgaaggtcgagcactttgttcgttccgcctatttagagaaagttgtaagcatgaatcactacggctagtacccgtgaagacctcttccagccttaagaggcttacctagaatcggcgctcctttggcaccgctaatcggctggtcattgccatcctgcctcttagtccgaggtactgcaaaggcagaggaaacaaatagtccaaagagggcgaggctttgggacttcattttgaatgaaggaaaagaatgtgcaaaagaatgggattggactgagatgcctcaagccaagcacgacggagtcatcccagttatatatgacaattcgacactaacccaacccctccaaataccgagggggcatagacctccaggaattcagctagtttcaatgtgccgctccctagttcctcggcgttgagatgttgatcctaatgaaattgaccagaacacgagttatcagaaagtataaacagtcacaagagatgatgcaatccaggaagatctactccgtattccgtatccatcttgcctctcacggaagaggttgcaaaagaagccatcctgaatcgataatagaccggaaggtacggagtagttctccgtaaaagaaaactaagcatggccaaggatataacaacattcttggcatcatgtcgaaatcgatgccgggtctcccgtgctaatcgtctctgtggggaaatagacgatgtcgatccagggacctgacaggtaacttgttggtcacgggacttgaaagtcgaccctggatcacctcatcggtaccttgaatgagtacatagatcccacatttcttggcaggcgcggatcattcctctactttgacctctctggttgctagtctcaaaaataacttgacatttgctttgacctctggaactcaataccgttccttgtttgagtgttgagtcgaatgtgagatttggtgatcgtcgagggcggttcctggaccttgcctattccggaaattatggattcccttaaccctagttcgacgacccgttcgtccacaacgcatcaatggcactgatagacagggcgaggctcagtcccggtatagatcggatttggttttgggtttgagctattgatttcaacttgcagtctctctcaactttggattaacttcaatcacgacatcttcttaagattaagaagaattgacttctcagaaaatatctgaatacggggaccacaggtccagcgtcagatcccgagtcggggattgttcggattctcatgtgggcgttgaggtatgaaattcgccatttcgcagatcagcgtcccctcgaggaatttggaagatcacacaaacccaaaatgagacttttttgcgtgctctatgctgatattgtcgagatggctcaggggaagagcaagatggtacctcaattggggcgagatgaaggcatacccgggtatataagctctcgaaatttcccgcaaatatgctcatcaaaccaacgcaatcccgctcattctctctctccaacaagatgaagtactctattgcttctattgcgtcgctgattgctcttggagagtgtctttctttgcctcctctcatacccactattcctggagtgaccgaggctttgacgaccaacgctcctcctttgccgattttgcaagtccctactcctccactggagagtcctcccttcacgcccagtgacatcaagccgaagaagattgggtatttctggactggctcaggcgacaagttccataaaggtatggatctacgcatggtggattgacgagaggagatgatgctaattatcattggtagacttccttgctacctatagtttggatgatgtaggccaatcctaagcctggtacggagtcatttgaacctaattgctgattcgactttaggacacctttggaacccttttatgggtcacagatgtgcccagcagtggcaatgacccccaccacctgggaccgtcgctggatggaaagaccatctggggtggtggattactatctctcttgaagactcaagtatgtagacttcttctcaattcgcctttcacagcatatctaatccttcattaggatactggtttctactttgacacctccaacccttaccgccccaagttcttgaagagtaaccgcggtatccttgcatccattgcggatgaggttcgggcaaagcccgatggtggatttttcatcacctacatgggctcggctgttggtacctcgcctggtcgtctcatcgagactgatgccgactttaacatcattcacgaatggcccgaggatgtggaaggtactctcaacattcttgaacagcagttctcccctcacggactcagcatcgattgggagaaaaagctcattctgacctcggacttcgttgaaccgattactatcttgaagccaagtctcggagtccgccgcgccgatacactgcgtctctgggatctggactctagaaagattctcagcaccctcacaatccctaatgtaagccagcccctgaactttaatccgcatgcatcttctaactcgatcagggtggtggtatccaagatgtcaagttcattcccggacacccggaatctgctgctatcgccactgccgtgcacctgggtcagctttggatcatctaccctctgcgaaaggacgccaatggcaaacagggtgtgatcgagcagctctacgatcttggtcccaaggcccgtgacaccattgccatctagtaagtagcttatctgctgtataccataagaaaatcattgctaacaacatcaccccacagctccgacatcagcaaagacggtaaatacttctacgccacccttaccacagccaaccacattgccgcgctagacattagcgacctcaacaacgtcaagcgtctggatgaccccgatgaggatcagcctaccgtcggacctcactatatcaaggtcacacctgaccagaagcacttggtcgtcaccgactacttcgtccagactggcgacattggtatcatcaacaccccggctgacttcaaggcgctctacatcgaccttaaagaggatggcagcctttctttcaaccgctctattgacttccccaaggagttcgccaatcgtggtggtgctaagcctcactctagtgtggtctttgatctcactgaccctgagaatcctatctactactgagttatcccagtggccaatagtaggatataggacactgtcgatgtgaaatggagatgtgaaatggagatgatgagggcgggatataattttttctcttctgaacttgacataggccttcgggcgatgtattttattgtggatatactacagctacttcttagttactactaatggacatccactgtactttttttggtgaagaaaatgaacctaatattacacagacactttactgggtattgaaggtaaatcaaaagtgtgaactagagtgtagtatcatggagggaaaaaagcaaatcaatataaagatatactcattagagccccatggctaaacttcatgcacatttgatgtagcaaccttcgggctttcatctctccgatgccgaccctcgatctgatctggagacactgacgtactaacccccttgcccacaacgatatcttcttccagcacagcgcggaattcctcgcgctttggcagaaggtaccgcacatccacaaatctcaaaatgctcgtcataataatcacaagaaccaacaaggccaaggcagactgccacccatatttatagaagggtgcctgactcgcaggccagacgaggacctgcgaccatgaggagatggcataatacccagcaacagcaacgccgaccacaagagaccgcgcttctggatcctgcgggatgagatcagaaagccaggcaaagatcaacggcgccgtgccgagacagatatacgagatgaagtatgatgcataaacagcagacaaacccaccgacagcgggtgtgtagtccaaatgctcatgataatacacgggactatcccgataaccgcttgaataacgatgagtgcccaacgagtttcaaagtaatcggataacagggcccaaatccacacgaacaccacattgatcgccgatcctccgatggggatagcgttgacttgcgagacggtccatctcgcgcttccgtctgggttctttagcgatttcaggaacagcccgaaataaacatatccgtatgttccaagaaccgtcgcgatatatagaatcgcgatgaagtagacgacccatcccgagaacgtgcgcttcacgccggcccaggtcatcttctttggctcggcgcggccgttgcgcgccaggcgttccagcgaaagctcgccgtggactttcttgaaccaaaacgcgcgcgggttgggtctgttcgggagatcggggagcatgacgaatcctgcaaatccccaaattaccgtgatgatggcgttgatcacgaatagccagcgccatcctgctaggccgctatgcccatcgagagtgtcggtgattgcggcttgcatggcgcccgagagcatttgcccgactgcttggcaggagtggtagaagcccattcgcttggcgagttcggttggggtataccagtgcactgtagggtggttaattcgggtcaagaaaaaggccttggaatgacatactgaataatgtcatcattcctggccaagcgctactttcgcatagaccgaggaagacacggatgatgtagacttgtttcgcactcgtcgtcattgcgaccaacccggtcagaacaccccatgcaatctccaagcctggcagccaataacttgggcgtacgtaggtgagaataacttgagagggaattagcattatgcagtaggcgacgttgaagtatgttgtgaatctagacagtatcagccatcaccaattctgaagtatggatgtttagggcaactcctcacagattaagctcatttccgagcaagttcaaatcctctttcatgccagacacgtaggcattgttgatattctgttgatcaagatatttgataactgacagaagtcagttttgccgatctcaagccgtggggggatttgtatgccaacgcaccctgtgaaagacaaccgaaagtcatcaggaacatatcaaggcgccggaccaaggccttttcctctggagagcggaaatcgacatttgtcgacgctttgcgacgaaacattttgaaggagaccatgattctggattgacagggatgagagaaaagccaggattcttgcgacggtggctattcatatacaagcccatgcagatccaagctgtgataagctccctgcaacccctcagagataggtcacataatgtggacaaagtagacatcggatcctagatccgacaaggattctgcgagatgcacgcgtgataagcattcgcaccaatggttgtattcctccattgacctcggaggaatgccggagtcgttgatatacaagataccaggcatgttggctattcaccccactttccacaaatgaatttggagataagttaaactcagaataatcctatcaatcagaagctctagagaggagagaaaaagctttcgggtggatgtccgtgataggagaaccacagcttccccgcatctctgcgccgacagcggtgaacccgagactctctctcacacagagctatatatattctcaaggatttacggaaatcttgactcattgcaaattggttgaaatgttggttccgaatatcgcgacaagcagaagcctgccaaatcccactccttgcttgagttactggcagcgaacaactcgagcatatccacatttgtatgcgaatatcgatgcaactgttccatcgaactcaaaatatgtcatcgtgggatctggtatttctggcggtttgacggccttcaaactgatcgaaggaggggccaaggccgaggatatcgtgattctcgaggcgcgagaggctgccagtggtgcgagttcacgaaatgctggacatgtgcgaccaggtctgtcaggcttcctttggggttattgcggccatttctgatttggaagatagatgcctttcggggtttcagtgcatattccaaagtgcatggagagcaacaagcgttgaagatcatccaggatgagcgactcgtcctagaaaaagtcgatgaatttgtcaaaaagcataatgtggaatgcgacttcaacttgacaaccacgtttgatgtctgcatgacccctgaatttgcggcttacgaggcagagagcctggaagcgttcaagaaagcaggcggtgatacctcgcacatcacgttctatgaaggggaagaggcacagaagaagaccagagtccccggagctgtagcggcctatgaatggccagcaggctcaagccacccggcaaagcttgcacagtttcttcttcaggcagtgatatccaagggtgcgaagctcttcacgttttgtcccgccactgaagttgaacggagcagtgacacagaaacctggaagatacacacacctcggggaattatagaagcagagaaaatcattcattgcacgaatgcccatgctgccttgttgctaccgcagttggagccttacattcggccaaaccgcgcgcaggctcactctatcgtgcctgttccagctttctctggggaaaaggctctacagagcactttctcgctccgctatagcctcctccacttctactccttgattcaacggaagggagatggcacaatggtgctaggcgtatcgcgatcaaacccaacaatgagcgctgagacaagggctggtcgattcagcactgatgattcccggtataatgaagaaattgccgaagaagctttgcggacttttagtcagatgtttcctgcttattcatcccaggctgccatgcacggtgagggcctggatcatgtttggactggaataattggcatgactacggactctgttccgttcgtcggggcagtcgattccctccctgggcagtatatttgtgctggattcaatggccatggtaagttttgcttttgctctactacgttttgaaagcggacgtgctgactggtaataggtatggcccggatatttacatgcgctccgactgtcgcccaacttgtacttggcaagacctgggatgaaacggggctgccagaatgtttccaatttagtgaggaaaggctcgcacggctttcaaatggagagttgccttcaatttggtagcgaagtgctcatacccgggggccggaggattgtctgattggctacaactagagcttcacgggcttggactctttcaaatatttagaatagacagggaaaaatagaaatcaagcctttgagctgatatgtaacaacatatcgcgatactctaacactgcaaaggttaggtgagtgaagagacaggggtgcagcttagtcaaattaaaacaaagtttcaggctgctctttcctaattcacactttccccttacctgagtatttcatcacatcttaaggaaagcagcctagaaccttcattaacttattggcattgagttggaacaaccctagaagctccttccaatccccaaagtggggcatcggaccgtcccgaaaggaagcttccgagcttcaattccttgaagccaaattgttcctcgaaacttcactatgattggccaacggtttacaagtcgcgtcacaaagcgcgcattcatttcgctccgtacgaaaccactcaacctccctcctacaggccctaccttcgccatacccagccacgaagtcgtcgatgaagaaagatgtccgaactatattccccaacactactatccagcaagaccgggcgagatacttggcaataactaccagttgctagcgaagatcggctggggcacgagttcgaccgtatggctagcacgagatatcacaaggtagttttggttctacgccaatcctgtccgaggctaattggagctgctggattaccagatatcgatggcagtccgagcgaacagttgctttgaagatcttgaatagctgcgatgctaaatctgctagtgaccttcttggtatcgaggagactgttgcacaaaagaacccttcacatctgggctattatattacacgcagctgcctggaaagctttgagcttaagacgtcggacaaaatgcacctttgccttgtatatgaggcaatgcgagagccaatgtcaatgttttaaagacgcttcaagaaccgcataattcctctcccgattgcgaaggcatatattcaattgcttcttgtcgggctacagtatttgcacgccgagtgcaaaatcgttcatactggcaagtgatattcgactcaagcaatgttatgtgaaaaaaaaaattgctaatcagcaaattcgctctagatctgaagctcgcgaatatcctgatgaccttcgagaataagaaagctatcccaaggttcattcaagaacaagtcaccaggctccccatgcactacaagactgatccaataaccaatcacaccacataccaaagctatcacggtttcggggcaatggacgttgaggacgtcgggaatgtacttccgagaataaccgatttcggctcagcatggcagttcgtcgttgacccggaaacgaagtcacaaaatgaagccgtgcttacgtatcctatacaaccgagctactaactaacaccgtgcgccggaggttgtccttggctatggatgggatttcagcacagatatatggaactttggtgtccttgtaagccgcgtgaatatcgatgcgcctattcagctgtcaagactaactcaatggttccaaaggtttggaacatcatcgaaggcacagagctgtttactcaggttgaagatactaacggtcgatatgatgccaaatcacatctggcagaaatgatcgctctgcttggtccaccacctaagggggtaattgagcgagcagaccatatgtcacaggtagacttccctacaccaattaggattgaggcgggaaagctgtccaagaatgcccgagaactctttggtggtccttacttcgatgaagaaggtaagtcttctactcgacgtatgagtgttttgactgattgttggcgctagggaaattccttcacgaggaactcataccaagtcgaaaaccggaggatacaattccatctcttgatgactcggaaagggaaattttcttgtcgtttgccagggacatgctcacgtggattccatcggagagaaaaactgctcgtgagctgatggagcatccattcctcaatttcggtggacatgtttctaaagatgccttggaagggcgctcttagaatgcgagctgttatatccattgatctcgggacactatgctgcttacagtttgtcttaccgtcagaagaaagctctccactatgtatgaaatctccactatctacggttattaaaaggactttcatgtatattgtcatggatatgcaaatcgaggttaaaattatggtacatgcttcgcttgtaaatgcagattactatcatgatatggttggaatgtccggttcagtatatatactcccgggcaacggtctcggtgaacgacctcaagaggaaatccccggagatctcgctctgccatgggctcaaataatatgaaaaaaccagcctctcctggcgggtatcaggatcatagggctatatcggggcaagccggtcacccttagtattatatccgagtccgagacaagcaatgctctctttctcagcagggttgtcgagtacgtgctcacagccgacgtacaaccccttattatatagaaacaaagaatcaagatcgaaggaatcacggcatatattcatagcgccgccaattctcctcaacccaccacttcgccacgtgtgccgcgtcgttaatccactgcacagcatcctctccatgctcaggcaagaccatgttcatcaaatccaagaggttgaaatcctgcagtgcttggagttcatgcgggtcgatctctacattcgagaacctccactcgacgtcaggaatgagtggtatgacgagacggtacggttttgcagcggaacgcagggcaagccatgttccgccggtgttcatgactgagaactgccagtcttgctttccgtctttttctgggattgtgggtcggatcattgattggccttcgtagagggggaggagatcttggatggcggattttgcttggttgtcgagggatccggattcggataggatatcgaggattgtggggaggatttgcattgaggttactcgggagtcgatctcgattggtggtagttgggggtgggcaaagactagagggacgtggaagctggagatgtgggggttgtcgtatggggtaacgccgctgttctcggggagtgagatgccgctgttgggattagattcaatcgatcggagaatgttggagtttggttggcacttactgatccccgaccatcacgaccagggtctcgttggcaacgcccgtttcctccaggatgtccaataactcggcgagccatttgtctgcaacaccaagcgtattgaggtagcgatttaccttatttttctttcccagccagccgtgactgatcaattcttcgtacttgtgatttggtgtgtcccaaggatgatgcgtaatgccagtcaagtgcgagatgaatagtcgttctttccgtttttcggccgatttgattgcgttgcggtaataatcccccagctctgtttcgggatatccccagaaattgtacttcactggttgaagaccaccctgcttggcgcgatcctcggaaatgttgatgtcggttaccttgtgcttgaagcccaacgcaggtgtgagaaggtcttggttgtcgtagtcgtcagtgatggactgcatccatgtggatcgccatggccaagtggtatagtcctccgttttggtccggttggcctgagcgttgagtgcttccaggatatgcggcaggcacggttggtagatgtggtacaggtattcgcgattgaagtccacgaccaagggagcgataccgcacacagtcgcgaggatactcttcaaggtaaaggtatcgcctgtataagcgttggtagcatggaatcctccgtaaggctgtacagtatcgtttccattgaacccggaagaagtagctgttagtctctctgcggtgggtgttagattggctagcctttcttccacctcagcagggatctggccattgtatgactcgcgaatcacgtccccaaaccaggattccttgcgaagtgggaagacgtctgcgcgagtgctttctagcttgagaagtaacacgtgtttgatattgacactgccgctttggagagccttgcggagaggctccagaacttcattttcaaggttggagatatgaatggggtcatgtcttggatcataatgcaggcgcgcagtgtgattggcattttcataccagtcactgaacccggccagtttatcccgtggcagccagtcaaatgtgggcggtgctgccagggctgtgtgatttcccaaccaactataatcacctgtcaattcaggtaaattaaccgatgacggagcgcgagactgattcttgtcgaacggtgtgacaatgacagtatcagatagaaagctataggcggcatttgaagggcgaatgcaacgcaaaataatcacaaggccagtgaatgcgagaacaaagacccgcagccaaggagatcgcggagattcccctgcatttgcttgggttgtttcatgagagcccgaggtcaactcaatagcaccccgaccctcatcccagtcctcgggtgcgactcgctcatagctcttcaagatcggagaagtttgtttcctgcgacaggcggacggcagaacactcttaaagattgacgcaattcccttggtccaattgtatagatgtggggttgagaaacaggatgcggcaacgaagacaacctccacgatgattaaacccgttaggccagtgagcagtgttttgacagcagccttgtcgccgtggaagttgtgcgcttgtttccagtggatctcggctcctgttgcgacgtagaaggagatattggcggctgatagaccggagattgtcaaactacccaagaaattcatttagcgatggtctcactcaaccctatgggaactcgtacctaagtgggaccaccaacaaggccgctatgacacgtgcccatcggcgctggtaatcagcacacaggatgtgagcgaatgatacacacactacatcttgtaagaagaatgtcgggccccagatcatcaattctccgggagataatgagttcagatgcgagtagatgtgaagaatcttggcacagatcacggcgatgaacaacagagagaaccaatacctgcgcgagactggccaacaatgatcgaaccaaaaggttggggagaaagctttgcgtagtatattgcgcgagccatctcgggtcatgaacctagagcccatgttaatttatatatgtagtttgtgccgatctcaggcatgacaatatagagaaaaggtcaccacggtggaagacaatgaacggtaaatacaaggaagagaaggggaaaagaataagaaggccaaatagaacccggcgaaaggggaaattttaacagacagctccgaaccaattccaaaaataaaaatccagtccaatccaacatcacaccgtccgagtctccgattttcccgcactttcaaggcgacagtattccgtagctcttcaggagtgcttcagggtccaccggtctcacgtgggtaggacataagctttggcacttgttccggaatgttcgcctgtttagtcatttctatttctaacactcggaaaccaatcgcatctcgtcaagcggagcttatggtgactagtccagggatacgagggtcaggccgtaacttagtgagctgcgattcccttgcgtgaggtctccttgcgttcagcccgatagttatggcccggacacataactgtgttagcatatgacattgccccagtgaccagtcactaatcgcctcgtagctcgtataaccagtttggttctgctgactcgcttacggattcctccgtatcccgcacaggaggctgagccactgtccaagattctaggctacagcccaaaatataagcaggtttgaaatttgggtgcgttggcagccacgggcttacagatgatctcattgtttttgtgcgagaaaagagctatgtaggcatagcataatggagactttaatcccaagcacatgatgatcatagtttagcttccgtgccgctctggggtacagaagcctgaactttgtagatctgtgcagtctcatgaacaggtgcttgtaataaacgatgttcctcctaggcaacactggcaagatgattcaagggttctcataggttatcacgaatctaattttcatccatctatcttcaggagttcaattctgaaacagcaaggaaaatttggacgccactcataaggagacctaaatagccgaggccccaccaatcataatcctcgggtttccaaatgagagggataatatctctcagcttgtctaatagttctagtagttagttatagggcttagttgactgatttagaaaatcaatagtcaagagtgaacacctcagagttaaagaagattgttagtaagctgactactcggatgttaactaacttgcgggcctaaaacaattagggctgcctattttcgaagatcaccatagaacacatacaataggcaaattccattgaccgttatgatcgagaaccccgtctcaacaacagtatcctatgtatctcatcattcttccctctggttctatagtccccatacatacacccttggtatgtctatcaatatattgaaacttgaaagtgcaatttttgtatagaatatagttgcaggtctagccagtctgtggccattcatttcgacatgtatacaaccccacccctcgagggccaacccgcataatgcacacttccgtcccataattcttggactctctcctggaaaacaaagttgaaaaaaaaatacaagacataatatgtactatatctaggatagttaggtattcgattttataaagcgcattcctaagagtaaatttgcgttgaattcctcactgtgtcctcttccatagtagggacgaagtacgaataaaacaaggctagagaatctcacatgtagccttccagggttggtccactcctgtcaacgtcaacccaatgatcgtcgacgggaacctccgcacgttgtagctaagactgcaccaaccctcattcaggctttaactgtggagcatgacggtgtatgtctctcccattacccaatcccaggtattgaagctgctacaaattgacgggacaaccggctgaagaccattgaatgatgtctgtacattagtacaaagtactaatgcgtatttcaacagcctaacctcttccctttaccccttttcatcatcccgagaggaccccggaccagacaccgaacaatgccgcaaccactagagatcgcagtggtaggttcatctatcagttattctcattgctattctaacaatttataggatcctgacgtctacctccgaccaaactatagcgatgattggcattcgtaaatactcgcatttcccccattcaatgtcatcgacgtctcacacgatatgacatagggagaccacgtctatcggttcctcaatctatcatggcctaatggaaaatggcagacggtatgtttcatcctacatttggcgcacctgggaggtcgacccgttactcatatacttattatctataggtatcaaactctgagcgacagagaatatctgtatgcatgttgcagcatcttccaccaaagaaattgccaacttatgtccgattctcaccagggttccgtccgatgacctagcattcgagtcctatgaagccgggtacgtacgaccaacctttcttacaccatgattatcactgacactctcagtcacttgctcgcgctcgtattagattcggagcgagagaacccgcttttcagagcgcctatcgagaaggaccccaaacatatcctggatatcggaacgggtaagggtaactgggctatgtacgtcaaaagagaaaaaccccctccctcgtcgacaagactcacaccaatataccgcttgtatagtgatgttgccgacatgttcccatctagtgagtgccaatccccgaagctcagcaagacagtgagctaaccccatctagcgactgtgcgaggagtagacctcttcccacccccaattacatggatgccgccgaactgcatcctagaagtcgacaacatcctagaagaatggacctggagagatcccctcgacctaatccacatgcggatcatgaccggctcattcgatcacgcgggatgggatcacgtctacgcaagctcctacaggtaaatgccaacacctaaatatccatatccgcaagcatatgcactaacaccaggactatcgcagaaatctacgaccaggaggctggatcgaacaactcgaaggcagtacatgcatcgactgcatcgacgacagcctgccggcagatagcatcctgcgaacctggggcccgaccatgaacgcgtgcggcgagcgcgccggactcgcgatggatgttctcgatgccatgagcgacagaatggaaaaggccgggtttgtggatttgcaggagaagtcgtacaagtggccgatcggcccgtgggctcgcgagcagaaatataaagaggccggcgttgttaatttccagcattggctttctggtatggaggggtggtgtatgtggctgcttacccatttcggtgcgccgcatccttggtcgaaggatgaggttacggtttttttggcgaaggttcgttcggaacttaagaatccgaaatatcatatttaccagagagcgtgagtttggtcctagccctgtggtgtggtattggggggattgatatgctgatttttgtttagacgacgtgtgtgggcgcgcaagccttttcctggagagcttacgcctgagacgactccgatcaaaagcgacgaagagtgaatgatgtggaatgacagttttcttagcgagtggatataatgataatgtataggaagggaactgaatcaagatctttgaagatgcttacaatggatatttccaatagtctcaaatttgtgatagacaccctaggagaaaacgctactatacagcaccgggtgagggtcaaggcggtttaagcctatgatgctgatcttaaaagctataatagtcgagggtgctccacaaatatatctacaaggcgaaaatcgcaagtgtagcaatgttaatcatgtttcattggacaatgtcgtaagctagctaattgcgacaaatggctcgtcattgcgcttttcataacataaaatcattgaaactattctagttccaaattcgccaactgcgatgaaaagttccgtcgaagccaatccatgtatgttttccacttagaaagatcgcctgatgcctccgggccggggaacgccttgctcagctctcgggtaatctttagaattccgagggatgcctcctgggccttctccaactcttgcttgacggcgttgtcctttggcttgaaggaaagcacagtagtgtaatgctccgacaaagcgtctaggtgccgctcagtatcctccggtgcgatcttaatcagtttggaggtcatgagattgctgattgcacggatgtcctgctcgtcatcgagaccagcgaggatgcggtcaaatagttcggccgtatgggtacgggagaaggaggtgtcgagcgaggcataaagggtttcgtaggcactctgtaaataatgatgttagtggaatctagggtaaatagtaagagacactgacctttcgcaaatcgagcccatcatccactttgtgtttgaatggacccatttgcacctcgcgaatgagctctggcttgattttggtgtcaccaagaacagccggaagaagctcatctaggtgagggagcagaagatccatcttgttatggattgcagagttgagagtggtcaacgcaagccggtggttgcccaaatcactgtcgctgagcatgttggtcaaaaggggcaccatcaacggtcgcagcacatcattgtaagcatcgctcgaatcggcaagcgtgtaacggaatgccgaaatcaccacgccacgaacagccgggtcggcattggctaggtactcctatgggcatgaggttagtattagaaacgtagcgcgatgggcacgacttacttggaagtgggggatgtaagcaacggggttaaggagtgccaagcgaccgacacattcagccccaacagcgcggttgtcttcctgttcggagacgacaaggagggcgtgccacaatttgtgagcggatggtgcaagatccggacgtacgacctctggatgctgaagtaattcgcgtaccgaatggagaagcaaatagctttgagcatttgatttctccaacccattcaaaatgattgggagataagctttgacgctacctgcggccgcgttgccaagagcagtcgcggcagccaagcgcacgtgatctgactgagattcaaaatgaggaatgaagagacttggagtcaacgggcactcggggcccattcgcaggccgatttcgcctaggatagcaagggcaaggcattttcggctaacatcccgtgcagtcttgagttctgttgagaaatcttccattgtgactccaagattcggtccaccgtggaccagaagggtgccaacagctcttccgaccactgacgagtcccctgtaattcccacgtcacggagaagattctgcatcaaactagcacctgcaccttcgtcgccaatgactttgaccagcagaagcaacgctttgagaacagttccgatgagtggtttggtcacaatcgagcagatagcagagatcaaaccgctggtcaccattagttttgcattgccagggacaagtttggcaataatgatcaacgtgggtgtaagtgtgtggaaatcagctgcagcgagaagaggcaaagcagcattctccagtgctgtgattgtctcaggggtgaggtgagatctgatgttagaattcatggaaagactgcggagagtttccaagcacgcgcctctcaaggcacgatcggatttgcgcaagttcgaccctagctcaagggcgacattgttgacccaatcactagaaacatcctgtttgcggctagcgagaacgacaacatcatcaatcgcacggacagcggacaaacgagttgtctcattcttcactcggtcgaccaaaacagccagaccattagatctcctctcagatgaaaggaactctgcaccccgatcgcctgaagtgcgtgcgaggatgacaccaaacacatgaattgctcgttgccggacttcgagatcagcgcttgtgtcggtgattcgagagtggacaacatcataaagcttctgcaactgcaaagtaacatcggaaggattggcagatacgcggggcggcgtcattgcttttataatttgctccacagcccccaaagcctcgctgctgactttgtagttgcggtcgttgacagctccgatcactccaggcaccagggcaatcaggaatggcaatagcgcgtcggagagatgggtctcggcaatcactgaaatgagacccagcgtttcgatttggagggtacctgcactgacggcagccccggtatgagccgctgtgctccctgagagggatgaggtcttgagggcatccgcaataaggtcttcaatttgttggagatggtctgcaagaccaccatagcgaaccaacgaaaggcttttgaggagaatcatcacagcttgtttgagaggaaccgaagcctgcttccaagctttgacaaggttctgcacaattaaaggcacagagcgagctagatcagcctgagaaccagacttgggggacgatggcacagcaggagaatccattgcggacgaggttccagcactcggctcgaagtcaatcattgacgcatcactgtcttggcgtctacgcttgcgagaattcttcgagccaccaacggcctccaggaagtcgttggatgtgacgatcatggatccctcgccagtcttccgaacaagcgccgtcaatgtcgacaccacctcaagcttcacactctcttctctctctttgctaatttgggagattagagctggggcaatctgctgaaacaaggccgaggagtcggaagcgcgaccaagcccgtaggccgagatgacggtgtaaagaagcttggcagcacaccggcgtaccttccagctcatgtcgtcgatatcactgtagccgccttcttcttcaaagtcctcgaattcgtcgtcgtcttccaggtcaggctcttctgtggcatcatcgtcctcactgccatcatcttgggtgcctcccatctcctcatcgtcctccacttcagcgacgtttggatcatattttaaaaatcgaagagctgatcgagtagtgttggttaggtacggttgcatctttttgttgcaggagctgatcaacgcctcgagcgtgaccaaggcagtctcgcggagctcgtccgcctgaggatcatgttcatcgtctgaataggatgacattgtcgcgatgatgaaatcacagaatatgtagtttttttgtgaaaataggaaagcgaaattgcgtgggctttgcgacacacgcgctggagaggtgtgtggtgttggggtcaccgtcatgagcctagagttgcaggcaagctagctgccccgcgctagtcccgatatggcaacaaactcacgtgcacgacctctactgcaaaaagtcaagcagatcaagtgatggttgggcacgttgtttggaagctagaagagcttgaagaccaccttgctttcttgctttagcccttttcttgctgctctggttgtcacctgccttgggatctgttgaggccggtgttgaaccttgcacgtcaaccctcataggagttgaccctcgcgtggtgactgtagctgctctagacgaaggttttgagatatgatttctcgaattcctttgaggtagtactgtccgctggcagcagcgtagacacttgtagactgtagcacctgtagatgccgatccagaggctaaaggcttgctttttttcggcttgatctcagtaactttactccactggggctttctaatgctaccacacgccccacagtgatctctcttctgctgggcatttaatgacttagattcctcgtggagaagccgggtgtgcaccgctagcagatgagccgatgtcgacgaaccgagggggatagccgagacagcctgaatgagaaaggaaggatcaatgtgagacattgtgtggccttgcctattgaggaataaagattcgtattgagaaatcaaacaattgtcagctcaatagcaaagacaatagaggcaaacgaagaacaatggagacaaacagaagacaatagcccgatgtttgctattcagagatttgccgcgcgggagcttaaaagccccaagctccacccgccgcttcttcccatctacatctctctgctctctaccctttccatctgctatccttcttttcttgcttttcatctttcgttttctttcctgcagtcttcatcggctttctagcaagggcttgcattcgatttttccttttccgacagcctcattccggggattttcttatttttcgcgctatcaaaatcccacagctcagtcagatcatccacgatgccacctgtgcgaattgccgtggaaggctgtgtaagtgatattgcatgactgcagatcccccatatcatgtgacatatccacttcgcagctggttgctaatcattctgtatagggtcatggtagcctcaatgacatttatgagactgttgatcgccaagccaccgagaaaggttgggactctgttgaccttgttatcattggtggggatttccaggtgagttccttgtcatgtccgattccacactagctcaacgttaactggtcaaaccaggctctgcgtaatgccaatgatgcgacttgtctctcggttccagacaagttcaagcaaatcggcgattttcatgagtactacagtggtggccgtgttgctccctatctgacattgttcatcggtggcaaccatgaggcgagcaatcacctcgccgagctctattacggcggttgggtggcccccaacatctacttcatgggtgcagccaacatcatccgctttggacctctccgaatctcggggatgtctggcatctggaagggttacgactaccggaagacccactacgaacgattgccatacaacagagatgacgtttcttccgtctaccatatccgggagctggatgtccgcaagttgctgcaagtgcgcacccagatcgacatcggtctctcccatgattggccaaagggggtcgaaaagcttggggaccatgcaacactgtttcgcaagaagtcaggcttcaaagccgattctgattcaggaaagctcggaagcatcgcggcacgcgaagctctcaatcatctgcgccctgcctattggctttcagctcatctgcatgtgcgttacactgcaaaggtgtcccatgatccacctcgcgcaaattccatttctttgagtccccccagtcctcatcttgctgtgtccgatacaaatgctgtggccgatacaaatgccgttgacgatacaaatcatgccactgtgatcccacggagtaatgtcaacaccaacacccttgctggccaccaattgcttggtactgccactggagacgaacagtctcgcatcaaagcctggaacgaattcggagttaacgctcgacgagctgagaaggagaagcgagaccaagacgattttatgcgtatgatcagagcgagaaagccgaaacctccccgaaacattacgtttgaagaaacggtcaagattgggcgcggtcccgttcagacgttcgtacgtggcgccgatggagaaaaaatcgaacccgccccagccgacgatgagagcatcgaaaacctcgacaaagttagccagggaaacagccctgtgaatatttcttccgaggaggccgttgccaagcagggatcttcgctgcttgctgagaccactgaagatgtccagacagccaagcatgtcaagacaatgcaggatgtcaagactactgacgtcgctgacaatattgataagatcagcatctctaccagtcccagcagcaccgcgagcgttaaatcttctccagctcagaaggctcttccaaaagccgatatctctctcaattggggtggtgatccctctcctgattcctggtggaatgatgatgagggtgatcgcgttcctgaagtggaagccgaactcccgagcagccttgcgcagtcgtttgtacccaaagctgccacaaataattcaacttccgaacgccttccacctcccgagatgatcaaaaatcttgagactcagttcctgaccttggataagccacacaatcatgatgcctttgtcgaactgttggagattgagccaatttccgaggaggatgatgccccagtggagtctcccctacgactcaagtacgacaaggagtggctggccattactcgtgcatttgccgatgagctcgagtttggtggacaccccaagggcaaggtccctgcccacaagggatttgaatactaccaacagcgtatcgccgaggaggagaaatgggtacaggagaacgttgtcaacgctgggttgttgaacgttcccactgacttcgtcctgactgcccccgtctatgaccccaatgtttcgatcaatacccaagagcagccgaaggagtacaccaacccacagacctctgccttctgcaatctgattgggatcgaaaacaagtttgacatggccgaggaagagcgtcaggctcgcatggcggccggcccacgccccgaagaacctcgtcagtacactggtcgtggtggacgaggtggtcgtggcggccgtggcggtcgtggtcgtggtcgcggcggccgtggttctggacgcggtggttatggtggtcgtggtgggcgtggcagcactgatgcctggtaatttgatcggtgctttcgcgtttctgttggcggcttgacgatttcgaacgggggaagtaggaatttttgaagttagaatatctttaccaatttcttttgttttactctccccatgtatgtatgtctacgaaattatgaaaccatacagtgatcacctagtttcgacttggatttctgcatatttgtgacacgccagaatttctcggttagcctgtgctctactggcatgtgctatgtatcctagggcaaagtttcccgccactctctccatccgttcagtgttaagccataaatctgtcttcttttcacttggaagtgtctagatgtatatttatcaaatgcatatatgcttttcgttgcatttgacctttcccaagagtcttcgttcttcgtgtttccgcctccgctgtgttaaaatctttttttgttcgaggcttttattcaaagatgaagatagatgaagaagctgatcaagtccgccaacaacctaatactctcattgaaatggtaatcaacaaccacttcagcttccaccaattggttgtgaccttgtaagattaaaaaaaaaagatgtgcatcatccgtgaatcgaacacgggcctcgtcgatggcaacgacgaattctaccactagaccaatgatgctgaggcaccagacgattctgagagctgattcgttgatgatatctggtggtccctgttatcgtctttgaggcatctctgaagttctagatctttgaaatccaactggtcatttttccaaagatacctactattatttgatatttgatggattggaataatgatttgcgagaaatggtaattattcgtcacatggtatcggagcagttggcttcattcaatctcctcgatgcgtggatgtccggtgctttcccattccatgggatcaacctgtagaccggcgatcctgtcacccagcccaaattgtggattgaagccatcttgaccatcctggatctgagcgccaatgccccacatcaaggacttctccgaccaagcttccaagctttcaatcaaggcgcgcagatttccacgagcgagcccgtcctcctcacgaccctcgacgaagcggagagttcgtagcatggcagggatgttaccaatggttgactgtccctgcatacttgaaccacgtggagccgaaaaactggaagccgagtcgtcaaaaagagaaaagccaaacccgatgtcccggtttccgcgtctctcccgcgctgcctcgagagctttgagaatgtcgaagagtagaatgatactcgcccggcgcaggatagcactctctggttcagtctcgagagttagggtagcaagcgcgagttcgacggcggaagaaagaatgactgggccaagaccgaggatattgacgttgatggctgatccaagaatggaaatggccgatgcccggatgcgaaggtcatcaggagcatcatctgcggatgcaccggcagcccatgcagcaaccacgtttgtagcgtacgccgattgctctggggattcgtcgtctaaatgaagttctgagaggtcaagctcggaagcagcgttggctactcctgatgaaatggaccagccttccggcatagctggctcttttgccttgcgctgtgcgcgttcttgttcctgtctctctttggcgagtttttccttgcggatttgctgtgcatgttgcttgttgccacgccgtcctgcaacggcaatgataccctctccaagaattttggccgtatcaccgaccagtgcgtctcctaattcctggactgttcgcagcagacactcaccaatcctgagtctttcgtccaaggctcgttgctcgcgtctatctgcgtactcttcaaccaaggttttgatcacggtacgtgggtgacgtgatgctagtgtaccaactatcttaattgcaccgaggtatgcgtattcctcgttggcagcggttttagatgtgtcggtgatgagggagagaaggagtgtgagggtcgagcccacatcaataacaggtgatgagttcatgatcagtttcgaaatcagcgataggccctccgcctgcacgggtggtaggtctgagttgagattggcaagcgcctgacgatgcgtgtcaaggtcctgaacatgagctggtactgccttgattgtggtttcatcggtagcggctaggtgaatctccaacaacatagacgaggtcgttgctgctttggagagggtagtgggcagaaacggaataagttgatcgaggtcctttttcaaagctccaaggaggggttggatttcggcagtgggagagaactcggcggatgcaagaagtgtggacatcaaactaaaggctgtcgaaacggactcaaaggagtcgttgcttaactcatccctgtcgttgtccttggtttccacaatattagccagagatgacagggataccttgctatttacgcctcgcatcgccgtttcttgggcgctaaatctatgtaggtccccatcaataacctgcttgatgagctctaaaactcggagcgggcgtcgagtgagtgcttctttgaagttctcaagcagcttctctgcaaccttggcactgacaagcctctgtatgatgttgtcactctcatcaacgggacctccgttcagtgtcttgcgagggggtgcggaaccttggggatgcaccagccagttttgactgacatagaggaatatatcccccgtccgttcctcactgctaggatccgagccgatgagactgacgaaaatatctgctcgtccttggagggaatcgatcaatcgcaccagatttgaatgctcattcgttttctcactccgcttcttcaatgcgaccccagcgtcggaatctttcacgtatgtccacgtcgagcctccatcccaaagcagattatcaaccagctttttgaggggttgggcaccaacagagataccaaaatatgtttgtagcagaggcaataccctttcatggaatgaggtcagctcttcctcctgagagaaacaaactaagccccatagtggaagaataatcggatagacgattcgtttcacgagaccggggtttggatgctgcaatgtcagacacctcagtctgcttatagccaggtccactgtggcgccatccaccaagacattggatgcgggatttggtgccacggaagttggaaaagagccttcaacatcggtaaaacgggtgatccatcgccttgatttagcgtcaagattcgcggtaagtgcattgaatataggctctataaagatggagtggccgacagtaccaggagcgccataagcccgtttccccaaaattccattaccgacaacgtaggatgcagtttgcctcagatccggatcatcgccgtctatcaatgctagcagttggggagcaattgtctcaaaatagacagttgggtcaacaccagatggcacagaagaaaggagtcgtgagatttgcatgatcgcctgcacagtcaaacgagggccatgtgactggtcctgtgcttcctggcctagcgatggggaaaactgcgatgcaatgaacatgatggtttgcactactccaccgggtcgtagcggaacttgcgcgatctggctggagatagtggacttgaaccatggtgcagtatctgactggaggaacgcggacagcgtaggtagcaacacagtggttggggtactgtaggctgttagtattacttagaaatagtaaaagcaaggggaacgtactcatcaattattttggccaacgttttctgatacttggtccggtcgaatgatgctgtggtatttggattgaaagccagatcggccgtgccactgattatatcactcaatatacgaccacgaatgatcggctggaggcttggtcttgggtcgaaaagaacgtcaaccaaaacgtcgattatgcggcgcaaaagaggctcatcgtgcggtacactactagcagatgcttgagcctgcttcgcaatgacaccagctggtaataccgatatcacacgctgctgcagggggatcccaacgccagatgatagcgaaggatatattccttccagagaaaccaggtccagtaatgcatgtagcatccgacgacgcttggcatcttctgctggtgagtcttcaacctccccgcatgatttgagtgacccaaattggtcctcaggtgatacaaatgatttatggatactggtcaaaatatccaaagccctattgatcaccgctggtctcgcggcatcatcaccctccgaatcccgactgaggatctgcaacaaggatttgccttgggtcttctttatttcctcttgaagatatagttagcgctcgacctagatgtagcttgacatctcaaaggtccatacctcgatcgagaactggggtcagaaagttcttagcaatgccaaacgcgtcgcgaagttgctgttcatctcccatcataaataattgtaggatactatcatgctgaattcacgccaatgaaggtattttcctcatcgacattgtccggttccaaggttcgaaaagtaaatgaaatcaccacgaacaattgcggtcttggcgtttgtggctgattatgtcatagcagataaacccgtgactgtggtaatcacgtgatagtcgcgtcagtggcccgcgcttgcccgcattggtattgtcgcgtcaactgagatacgttgttgttgtcaccaactccgtctacttctatccactgctcatttcacaatttcaattgacaatgttagaccgatgtggacagttctccagctaccccggatcttgcttgttcccacgacattcattggaccccattctcgttcaaacctgccacagttccaccgcgaccgtttcctgagtgtggagccactcgagtctcttgccttacaaggcacacatatacagatcaaccctctcagatcttcattttcctctgctgccttaaatggtgaaccgtcacgtatatctcgccttcggtgactcatattgtttcggtgcaaaagatattgaagtcaaccccaagcctctctcggttcaatgtccacagcgacacagtttcacggattgcgcatgccggataatacgattagccgaaacagactgtgatggtccgattaagcgaaagatattcgaatcagccagagccttagggcacaaaagacggtttactatgcgttatccaaatggagagcgcgtcggtttaccaatgctggacgctgcatgccggtcacaaacggatggtcgccctatgcctcggatgtcagttcaacgagaagagaacgtgggtgaagcatgtcgggtacttcggtatcagatgttaccttgaggagcaaccacgacagcgcgaccagatggcgattgaatacgacattcaagtctcgaatatcctagggcgtcaaattgtttggctcagatatttgttgcctagaacacagcagtatccttacacacagtcatagtgtcagcatatccaaagaatccactcgccggaatcaacattcctctccctgaaaattgcccaggcattttcacagttgaagttgtcgcgaggtcctttggttatgctgccctatgattcttcaatgttggccctaggagcacatagaagattgcgaactgttgtctcgttccagatggcaataaatttccccaaacaatttggtgtttttcggacttgtttgtctgtactctatcgtcaattctgcgatcatcagctgtctgctcctgcacatgtttcctattccaggatccctgggggtcttgcccctgcgttccaccttcttgggttctgttactcctacgccccacaggcggctaggcacctcgtatcacggcacccgccactgattcgacttcgtcagaagatctcgaccgaccgtgttagccatctcttcgcaaagtagtttgtggatagatcgatgggcgccgatctcaacaatgacttccaccattgttccttccctagggaagaaggaagcgatttttctggatgttctttgtccgcttcacaatatgccctcccgcgacaccctcgcgtctaccgggagaggaaacaaaaacctgtcccagagggtactgtaccacacacgggagactcggcttcatgctcttgcgacggtatcggtgaaacaatggcgatttgactaaacgtgcggagatgggtggccgtcaagcagatttggttgagtttactgtgtctcatccaagtttggcttgtctttgtgaaatttgtgtgagctctggtgagtttgagggatatgttcatcggtgtcgtctgctcccagacattcctcagctcccatttgcgccaatctttgatgctcgccttgatatctctcgattgatgacaatttttctggtcggagcaacgtacggtttctatcgttcgaacgctttaactcatcagcccatttacagtcggcatgggggatgtccttggtcggggttctaacctgtatgcgtcatgcagtaggtgtcgtgggacctctctcgagtgaggatcaaagctttggcttgtctacgatgcttatctgctgccatgcgtcccgactaaggctcgtctctaatgtctggttgtaatgaactgaaaagcgacgaattggaaatcgggggatctctataccgcgaatgaactattgtttggtcattgggacttgggcgttgtgtcaatgatggttttttctttccatgggagcagaatgtttggccaggcgatagccggtggactgccgtttctactatcctttggtggtagaagcggccactttttttttataagtacccccaaatcctctaattccaaggtgatgctaactacttatatttgcagattctggtgcttggtggatatgacaggaaattaaacaataagaatgttagctaacacaatggacaatgcacgttgtacacctgcccatggatccatgtagatatcaatgacgtcactacatcatgccatcctcaccgcccttcaaatagaaggcggtgacatatgtcatggcagaaatgtaatacatcatcccactctttgtcagccccacctgccccgcgcagaataggaaggaatgttcccgtggctccgatatttttttggcgataagaatttcttgcttggatccaacttgctttactataacttccctcgcatttccctctttacacagatattttctatcccactacacattatttctcatttctctttacacaaatcatatacaatggtcaccgtctccaaagccgacaatgatgcccttgaggcacagttcgagtcgcaattccaaaagcccggcgatcttgtggagcgtgatgatgacaccggtgcgatgtcaattgaatcactctgcatgaactgccacgagcaagggttcgtttctgatattcgattatgttttgcacattgctaaccttccactttaattagagtcacgcgcttgctcttgcttcgagtcccttacttcagagacattatcctggagagtttcgaatgtgaacattgccactttaaaaacaactcgatcaaatccgccggccagattcaggagcgtggaacagtctacactttgagggtcgagaatgaggaggatcttcaggtatctatctccagctataattcgttttctcctgctcaagctaattggatatttagcgccaagtcatccggagtgatgtttcaggattcaaacttaccactaaggaaggcaaagagattgaagttcccaagggaacaggccagctgaccaatgtggaaggcagtatgtgaagcccaatgcaatatagttcgatcccaagacgctaaccgtatctagtggttcaactcattcatgaaaatttgtcaggagagcaagatctccgtaaggagcaagctcctgaactttacaatgcccttgtgcctgttatcgccagtcttgagaagatcatgaaacgcgaggacgctttccccttcaccatcacgctagatgacctcactggaaattcgtggattgcacctaacgccaatgatcgtggcaacaagtacaagcgccatgaatacccgcgtacccacgaacagaacgaggagttgggaatctccgctgacgaaaacgctgtcaacaaagaagacacagctgaagtgggcgccggcgacccagatgatctcgatatcgttgatggccaggtctacagcatccctgccgagtgccccggctgtaataagcaagccgaggtgaacattaagaaagtcaacattccttacttcaaggaagtcctgctgttcggcacgaactgtgatcactgcggctacaaatcttccgcaattaagaccggtggcgaggtacccgagaagggcagacgtatcactctcgaagtgaagaacgaggttgatctctcgcgcgacattctcaagagtgacagcgcaggactttacagtcccgaactcgacctagacgttcagccaggaacgctcggtggacgtttcaccaccgttgaaggattactaggttcgttccccttatttgattatattgacccagctaaccctttatatagttgagatccgggatcagttaaagggtgccattttcgatgttgacgattccgcacactccggaggtgacagcatggtctcttccgataaggataaatggcaaagattcttcagtcgtctcgaccaggctatcaacggcgagctcaaattcactattactttgcaagacccgatggcctcgtcttacgtccaagacctttgcagtccagctgccgaccctcagatcaccattgaggactacacccgctctgccgaagaggaagatgatctaggtctgacacacatgaagaccgagggttatgaggaggctgaggccgaagccgccaaggctaaggccgatgccgccaaggccgatgccaccacgaccgatgctactcagaaagagtagtcgaaggattacgatgtaatatccatttcatgaaactcgcgatgatctgattcttttgggattcttgcataacggcgtctgtgatatgtacttttttgctggggtaattagatatttggtcatacatagggatgaagtcataaaagttattttactgtctacttacttcatcatgcatttcttcccagtaaaactgttaataggagaggcctaccgagagagggggtcactttgaagtgtggattgaattgttgaagctaaactagagctgacatggtagaatctctctgtatctactgatcatatctaattttgcaattcattctctaaacggtgtacaatgcactaacacgaaacacatttctcgaatcttctcgcaagcaccaggcacttcatatccacgaagcgattccaaagttcagatgccaccaccataacagcacctaaaacgatcatggttcccatccaagtcatagcaaacgatagagcatgcttgctcgcctcgatagtaccaggataaggcgttcttgtaactgcccaccacaaaaagtctcgcaccggccatttaagagcgagatagactgtcgggtggactagatagagcggaaatgagatcttgcccaagtattgcagtggccgggagttaagtggcctttgaagcagcgcagatttgctaattgcatatatcaccagaacagctcccacgctcctccagcaccggggcatcatctcagcattatcccactcgggagatcgagccacggccagccatcggtattcagctgctaaccggtcagcaccgcacatgcaaaggaaatacatccctagaatgaaagagactgatattccaatccgttggagatagattttctctgtcaatttgttccaggctttggtaatgggctcttgaatctcgagaggtgaagatgaatacgataatgcaatctctctgtctggtccggactctgacgcgacgtgtctctccgcaagaagaatcccagcaacgaaagcgaagaggtcccaatgtcccatataaaaccaatacatcgccacgcctaccaacgccagataccgaggctggggcttccaaaacgagaacgtcaagatcaacaagtagacagcacacgagccacgaaactcaattggcatcgtccacagctggtagtttatagtcctcatatccggtcgattgcgatcaaaattgatatcgacttgatggttgctgatatccagcagatgcactattctcgaaagcacatattggacgtgagcccaaggcgccgtcaagggctttagcccgcctagccagtcatccgcagctttccacgggaacacattgcagaagtacacaagttggcttagaaatagtatggcgatagacggcagataaattcgaaagattcggcgagttgcagcagagcataatcgacgaaagaatccgacattactcgccccaacgtcctcgcgacatcgcagaagcggaagagagatcgcgtagcccgatataaccatgaacagggctaccattgacgggccattgaagagaagtcggaagggcggaagttggattagacgatggttttcttcggccggttcgtcccagtaggaccttgtcaaaaagccgacgatactcttaggctccgagctctttgaatggtgtattactaccagagctgaggctatgccccggaggctatcaagccaaagaatgcgccccatgctaggaaagtaatttgtacagaaaggagagaaagtcaacgagggctgatgctttgttgaatagtataataacttcggtaacttgtatagaattagattacagaaaggtacttttgtctggaacttgacctataaacttagtcttcaagctagtaacactagtaaaaaaaaaactcgagatcgatacagctgatcgcgtctgtaatacaggtggcaatgaaaccctgcaagacgacgatgcacgatataaatagggttcatcctcgtccctaagaggttatatatacggggtacatgcaggagccatcacaatatgataggtaaactgtgagatcccaaaaacaaaaagcaattggtcgatgaccccaaaaatgatattatcgtgtgaccccctgcagatccctagacttacgcctaactatgaattcattggtcgcattggacacaagtattccgtccgattttcaattttcaattttctacaaagtagatcgtgatcgttactcggatctgttcggctttagaatcactgggcgaatttcacgttcagatggttccaattcgttaaatattaggattaagccaactttttcctagcagtacccaatataactttttccttgaacaagaaatctgcagagttgactttctccacaagtaaggcagctctatatgcatagtgcccaaatctatatcttgcctgacaaggcattcaagcccacagattcggtctgtgcacgaatctgcttctgccacatagctttatatcgaccattagcagccagaagttgctcatgggtcccagtctctgcaacccgaccttcgtgcaatacaacaatgttatcagcagtggtgatggtgctcagccgatgggcaattactagcactgtgcgcccacgtgacaggatggctagtgcttcttgaatgttctgctccgtctcggaatctaatgcggccgttgcctcatcaagcaggatgatctgaggtttcttgataatggttcgggcaatggcgacgcgctgtttctcaccaccacttagtcgtaatccacgatctcccactttggtttcgtaaccgtcggggaacgccatgatcttgtcgtgtacactggctgcacggcaggcctcgtagacttcctcgtcagtggcgttttggttggcatatttgaggttgtacatgattgtttcgttgaagagaacggtgtcttgtgggacgacgccaatgtgtctgcgtaccgaatcaattgtcaaggtctgcgtatcgtatccgtcaataagaagatttccgctgctcggattgtagaatctatagagcaagcggaagattgtcgatttcccgccacctgattctcctaccagagctgtagttgtacccggtttacagtcaaaggtcaatccgttgagagcaggtcgtcgggtgtcatacgagaatttgatctcgttaaatgtgattcggccgtgacagactgctagcggtgttgcagacggtgcatccactaccgatggctggacgcggaaaagctcgagtagacgctctgcgttgatcaacgctgattgaatgtaccggtagaaggttccgaagatgttcaatggggcttgcagttgggccatgtaggtaaggagcgtcacgaactggccgactggacgttgaccacgagcaacttggtaggcacaaataaaacaggtgatgagaaggccaaacatgaaaatgacattctggcaaatattcatcagattctgtgcgaatagggaatgccattccgcacggaggtagtctgagaccgctcctcgatagcgattgaactcgtattcctctgcgttgaagtatttgacagtttcgtaggacacaagggaatcattcctgtgtaggttagtaaagcgtaatgagataaacagagacgtaatacaaacttacttgacagcgtcttcctgtctggaagcgttcaccatttgacgtcgcatattggccctccaagaggcaatcttgatggttgaatagaggtagaagaatgtcatgacagcaacagccaacgcgtagtacacgtcaaatacgattagaaaataaccaatggcgatggtcaaatcaatgaacatcggcaacacttgaaatgtcacttgctcaagaaaagtgttgattgagttgcctttggtgagggcagagagaacctcgcccatctttttacccaggtgaaagtccagtcctaggttatgaacatgctcaaatgaagcggttgacaactccatgtatgcatactggctcactgagatccacagattcgagcgaaccgactcaaggaaaccttgactaccttgaagccaacggtagatgatatacagacagatgggcatccaaggcactttcagatttccatcgctggtggacaatgagtctgcgatcactcccacttgatatgggactaggatatttaccgctcgctgcacaatcaatatagcaaagcacatgacgacgacaatttgcaaccggagagacttgtaaggccacagatatggaaagaatagggaatagccactcagatattccatccagttggtggaaggggtcgtcaaaggccgcacccatgcttctacttccggggtctgttgaccatcggtcaaggcatcaccatcatccgagttggcattgcctcttgaatctagcaggctagtcgtctctccggcatcggcatcctcagcctccttgaatgcgcaatgtttgcgggcagatttgaaaatgtaggacgcgaccagcagtgtgagaacaaaaatccgcactgaacctgcggaaatctccaatgcctcccaaaatgtgatctttgtacgcaatcttccaccgaatggatcttcgattgtaggttcatggtggatgtgggaatagattgagattgaagttgagagaatggctatctcgaagggaatggccgagagccatgggacgaattgcgcgattgacggtccacggttctcgagtaaagagatgaagataacggtatgagtgaagaaagccccgacgacaaagaactaggtttaattagctttgctttcaattttggaaacaggtatcgcaccactaccgcttgaccacaccaccactgctctgactttgaaactatggcatgggtcatatgaattgctgcctcagcaatataggttgccagcacaaacagatccagccaaacaaaccagcccttggatctattccgcgcaagctccgcgggcaagtccctggccaccgccatcatcattcgggttcgcctaggcagtggtttcccattggggccatactggactttaatgttgcgatcagcatttctggctacctgagaggaatggaccaaaaagacgataaagataaaccctagcaaaatcggagggtatccaaagcgaagatattgaagcaattcttgggcaacgatagccgaatccatggctgcaggcttataatcaaagactctctcaaagtggctttgaccgggcaagacgggaagagtgggaattgcccgggaaagtatgtgattgtcttcacatgcgaggagttggctgcgagatcgcaagctgaaagttcacaattgagctgtcgtgcgctcacattttagttgcgacggtgctgtcaatcagtggagctcggagggacactagtaacgccactgtattggctagtaatctttgcttccaagattgtgttacccatcgatgcatgtctgacctgaagatcggggtcagtgacttgtgtatactccagacagacgctattatctagtatatagacaagtatagagtacagggtatgtacttgacctcgtaccgaatatgtatgtactggatttccgcccttctggaccttctccttcctttttggtcgttgtctcttaccgctcttttatcaagggctgagcaggatgcttacataattcacatacttcgccgttcaaggttcgctcaccgacaccagcatcacctgactatcacctgaccacttgcctatttaagtgccctgattcgcccattgagcaggagctgagcggctgggtgctgcgtacgtcaatctccctgggacgatccgggtaggccgctgaaggtcaagttaaggtggctggacctcatactcagcctcccatcgccgataccatgagagctttggtggccatccagctaggtttgctccctatgttgcccgttggaatgcagactgtatatatgcattgcatagggatattgaaattgttcatttaatttctcggctaatatatctcatcattacttgttcatggtaaactatacagtaatatatccaccatcaactaccatagcatgaccctgtacaaaagaggcctgcgtggagcataagaaaaggattgcatcggcgacctctgctggctgacccattctcttcataggggctatctccgctgctggagtgatggccgcgcgaatctcgggattctccatgatgagtggtgtttcaatgacacctggacaaacacagttgactcgaatcccatccttggaataatcgataccatctgcccgagtcattccaatgaccgcggattttgatgcacaatacgcagctagaacactgtcaatcgtgggtttaaatggacagcagcgcagaacttacgagcacctggacggctaacgattcccaactgactagcaacgttcacaactgcgccccgctggccaggacggttagggtcgtgacttgggagttcactttgagacaccatctgtctaagctctgctcgagaagacagccagcagcctcggtagttgatattgttgacccggtcaaattcttcgaggctcgtttccgctgagcgcaatgacttcccaaggacacctgcacagttgacagcatagtcgactcgtccgaattgttgtacgactgcgtcaataaacgagtctgcgaactggtcatctgccacattcccagctttcactaggagttgagtcttggggtaggtagaagcaatggcttttgcggttgtctgcaaagacttttcgtttagatctgtgatagcaattctctcacatcctgctgcggcaaaggctttggctgttgcagcgccgattcctagatcatgttggtgatatatccacaacggtcggctatgctacgtacctgttccaccagcaccagtaatgactgccacgccaggaaacatattgtatgccatgactgatcaaagttaattatcaaatcattaaactggcaagtcaatccagtcaagaagtcgaagtatagcatcgaaactaccccaactcggaatcccacctttatcgcttatcacgggccgaactgttccgaaagtaccccgagttggagtagttggagtcaattctcctatctcgacatcgttaactatatgaatgtactagttatgtacatactatgtactatgtaacatgtagttaactacagagtatattgatccatctgataatatccatcttgaatagtattgttagtatgtccgttgaaattctccattttgtattttagttggagagcatgcatgtgttgtgctgtgttatatcctactataacttacatgtagttatgtttttcaacaacttgtacctcatcttatcgcataatctatctccaattttgccagacttaccccaaacccatatccacatgccaacctcacccctatgatattcaatccctcgtggtttcgtggggaaagtggaccagacccattccgtcttatcgcgcgttagtgtgcaatagctgtgaccaaagtactgtgaacgtccggataaattccagggtgccaagccatacataagcctgaggaaaaacagagataagtgccctcctcagcacttgtctatatataccgaccgtgggtcccccagttcagagctccctgttcactgcctatatttacatctgattggaaaccttctcatcctcgttcaacatggcaattcatacagatgagatcaaggaaacctctccctacccagacgaccccaaagccgtcgagacacaagaaggcgaagtcgacgacaaattcgaagtcttcaaacggggcgagggccaagtcgattttcgaactgtcagttggattcgggcttcaattatctttctgaagagtcagtttagtccggtctcactattgcttctgtgaaaactgacaccgtaatagtcatcttcgcaaccggcgtcctctccatcccatcattgatgtatgagctaggggcattccctggcgccgtttccgtgatagcttggactgtactcaatgcctattgcgctattgtgcagggtaacttccgcaatgcctacccgggctgccattccatcgtggacatggcccaggtggtcggtggaccgatcgtgagggagcttgttggcttcttgttcacggttagttatattattgtcgcggcatcgggtgtcattggcgtatcgaccgcattcaatgccctgtcacggcattccatctgtaccgtttggttctcgttcatcgcgatgattatcattaccatgtgtgctagtgtgcgcaaattctcgcatattggctggctcacctgggttggatttggcagtgtctatgttgccgtttttatcattgtgtaagctttggccacttttcgtctctcggaccaagtactaatggctctagtatcggcgtaacaacacgagaccgaccagcagcagcgccccaaacaggtgacttcgacctcggctaccgagtcatcggtgaccccaacttcacaaccggcatcacagcctcggcaacgatcttcgtctccagtgcagccacatccgccttcctcccggtcatttcggagatgcgcaggccaaaggattaccccaaagcagtctacctaagcatgagcctggtgacagcctcttacctgactttcagcctggtaatctacgcctggtgcggcaagtggatcgcctccccatcacttggtagcgccggcgaaaccgtcaagcgggtcgcctacggcatcgccctcccgggcctgattgtcagcggctgtctctacgtacacgtcgcagccaagtacctcttcgtgcgaatcctgcgcaactcgcgtcatctgcaagcgaacacggccgtgcattggtgcacttggctgtcgtgtacgattggtatgtcggctatttcgtttgttttggcgtgcgctatccccatcttcaactatgtgttggcattggtgggcagtttgtgcttcgcgcctttggcgattagtctgcccgggtggttgtggttgtatagtcatcgcgattattggaaggggaatgcgctgagggtcatgttgtatgctttccatgtctttctcgtgctattagggctgtttttggccgttggaggcacttacggggttgtggtgcagattaaggaggcttacgctgatggacagattgaatctgccttttcttgcgctgataatagttgagaagtgccgaggtctgcggagtacgatgtatacaacatacctcgtcaggtcaggtcatgtcgggtggtgtggctaccatcctcacctgttgttatttagactgttttctatatgagtaattgccattgagactatgatcaacgaataaactacaagttcacctttgatttcctcttggcacttctgccgagtgccgtttccgcaaacgaacccgaatccgccaaataagctgcctttcctctttcgtggacatcttgttatttagctcaatattatcaagatagtttctaccgtataatattggaatgtgtacaatgtagatcttgaattgaacgggcatgctatgtattcgccattatcatttattcgtaacaatttgaccttgtattaccgcactctgtgggattactgcagttggattgcaaagtgacctggttttaattacagtttattgatcctccgctgctttttactttttgctttttgctatgttgtatatggagtactccgtaaaacttcttattcggcatagtcaatgattatacgatgaatagctcgcgtgatacatttaatgttgcccaataagccgtacggagtagggagtgacgatttagaatatttacatagcttacatcgaaataccccttctattgatataaatcatagcttagcacatgcgacccagcacaaataggttgttatagaggtcattgctttggcttggatcatctttcagtgatggccaaagttcgtaaaaaccaatagatacgtaatattcggattttgtgtattttataactttaaggttcaggtaaagcgcgggaagagccatggttctactccatagtgggtcgaccttcttagctctaaccgatgccgatttgctctcgaagctcagctccacagacaattcttcagcttcaatacaatagtgacttatgtggagaataatacatcgtgttaccaggccacaacaaaaaccatggtccctatttatggcttagagcgggctgtatctgctctgtttctgggatagactgactgctattgatcaatatcaggttggcactagagtagacacaatggctttcctagggcaaggctgcctacatgcatgtcaaaatgtcctctggtggctagctgaattcaatactggagctgtattcatcagaagctaggaattgcgtacttgatgacctagcgtttggtatccatcgttacaaattcatcatccgggctttcaataatgtcatacccaggtacctgatgtgtgatctgcagctccttaggcctatcatgtcttcagccactcagccattaactgagacaaatttggcctgcggactacgaagacggacttactcgcttgaacatatataattggccacaaaaaggttgtgtatgctgtagcttagtatccaatagaacgctaattatgcgatgctccccaacatgatccagacagcgtatccattctgtcacagatcgacctgacctacggagtatgtagtcacaccgagatccaccgtatgttgcataaggtggcacagctgaagatcttcgtattatgtcgatcgttgtctgatcggtgtattttgagctagagtcaaagagagagcccttcttgagattacagtcgaatgaaagtgaatgatatattgttatcctatttcttttttatgctctgtccttctattgaaattctctaccccatagaatggccaccttagagcgagctagattcgaggaagatgttttgccaaccaccctcgacaagctcatcattccaaaagcagaggacggcaacttcgcattgactgcattacccgaggccgactccatcaccgaaatcgttgaatctgtcctcggccacgctgttgagctgcaccgtcttcaagcatccggagcagaaggtcaatctggctgctccatctacttcgtccggaacagttcccatccggaaagaaccgtcgccgtcacaaaggtatatccaccggcatgtcataaagacttctttgaagaactcgttgcatatcggaggttgatatctctttccgatccaccgtctgctgctcggcctctcggggtgggaagaacgcgcgatgagaacaccgcagagcctatcggagtgattgtctaccagctcgcagcaggtaaggcaatcaacacaattatccgtgacattggtcgagtctccactctccgacgtatcgcaaagcagccttgtccggaagaaacaagggaaataatgaatgatattgttcgcggtgcgctccatgggatctcaattagtcataaaacacagcaaatccaatcatccaatattccaactgctgagatgttgcactgtcaattcaatggactgatggccgacttgatttctgccgtccaaggagtggcattaacaatggccaagctgcaccgggaaaagagcgaatggagcagtgccagcgaatctgtcgtcgagagactccgcaacaagttacaaggttgggtccaagagattcagggcccatcgcgaaagcagtatgaacgcgctattggatcccataaaatacagcaattggcctcattggttgaccgagcgattgaatattcacgggaagaaggtgtagcgtcactactgcatgcagatgcctcgccgggaaatttcttctgggaccccgttcaaggaattaccatgatcgactacgggggactgacccgctcgatagatgcgagcggccgacctattggaccggcggaaatggatgcggctgggtttcacgagcgactgcgaaagtatgccggggatttcggaatgagtgaagctgatattggccaggttcagagggagttctggaaagcgtaccaggcgcagggtataccgatcaatgaagggcttgcacggttgttcaaaacacgcacacaactatctcgactatggtctgctgtggaaaagcaagatacatcacgcgatgaacataaagctctccagttcagcgaaaaagttgaattcgaatgggaacgtcttgtcaatatctcgcccgaaaagatccaaccttggagagtgctcgtccttgccaatgccagtgggccaggtaaaggaggtctgcctctgttgaatcaagaactagtcaaggccatgtcagaaatccccaatgcatcagttactctattcatggtagagcctgagaatgaagtcaaaaacacattggcatggtcagagcatggtcgggctaaagtagtctgcattccctctaggggagccgaccccggtgccttgctctaccatgtggcgaaggttcaacagccaggagattatggtctgcccattccagatgaccagcatccatgcccattcaatctcatcattggccactcgcgatactctagcaccgcagcttccttgatacgtgagagatggtatcccacagccaaactcgcgctcatcacacatacaagtgctctgcgcaagtcagacatagcatggaagtggtacggacaaacacgcgagcaaggctatgttgaagccgctcggctagcaatgctggacgagaggattcttccaaaagcagatttggccgttggagtcgggcctgtactcacaactgaagcacgagaacgcgagtggatgggccaatgcaatcggccacgatccaacatgacgggacctcgctttcatgaactaattccaggtgtgcgcacgggtgatgcttgcacgcaacagcgacagcccaacgacctgtttcgggtcctcctcgctggtcgagcagatgatcccgccaaaggcttggacgacgccgtgtacgctgtgcgcaagatcgcactctctggaaacgagatctccctggacgtactggggctcccagtagaagacgtggagcgctggcagcaagccgtcgatgagatgacgggcatgccagacctcgtcagattgcaccctttctccgatgaccccgatgcggtctcgcggttctactgtaacgcggatttggtcataatgccctcgatgcacgaaggcttcggaatgattttcaccgaagtggccggactgggcgttcccatcttagtgacgcaggaaagtggcgcaggtcagtttgcgcttgatcgcactcgcattccgccgggacttggccaagcctgtgtggtgatggacgagagcacatatggaattgtcccttcaccgacaagccagcgcgtagccgtctgggcttatcggatcgaccaggtgagatgttacccggagcaaacgagacggcatgctcgttctctacagcgaatcatgcgaggttattcgtggaaacacgccgctaaggctctgcttcgctccgcgatggagggtgagggagatacagtgcagatggcgcatggcagcattgcaccggcttattcatcatggtctcgtccatcgcttgggatgagcgtggtatcgtcaatgcggcgagctgcacgaacgcgaaatcgaagcggaaagccgactttgaagcaggcagacgaagtaatgcaaaatcttccagagatagccccgactatttcagcgctagcagagcatgtctctgctgctgttgggtgtcctgtcaacttgcggagtctcgatcccactcatcccgggggcttttctggtgctatcattttctttgcttttgccaacgatgaatttaccaatggagagacaacgttgtcatctaatgaccgatgcaaagaccgtgcggttgctgtggttaaactgttcgtccacggcttggataatggcatcacggaggagttgtcaagcttagaatggcttcttttgcatacaaagggggacatcaagactgccgccccgttagccgttgggcagatgacgtgggatacgaaaccagctggtgtggtcacatatcaagttgcccccggggtatccctttatcagctcatgatgcagatgggccgcctaccgccgggacctgcgagaagagacatgctatccgccttcattgctggcgtacaggcagttgcacgtaccttagccagattacacactcatagcgttgaagggcgaccaggcacagagtatctccagtggtattttaacgcagcaacaaatcgagtccagcaggcattgctgtacaaagaggttattcgttccgcgggactcgaagcggaccagctcccccagaaaatgaatcaacttattgccgattgcaggcgtgatattgctagtcgtccgcgcaccactgtcgtacatggggacgcccatcctgggaatttcttctatgactgcgcgacagggcatatcactatgatcgacacgacgacgctacactgttctctggatgagaacggtgagccgcttggtgtaccggaacgagatttaggccatttcgtgcatatgctgcgacgaacaggcgaacagtatggccttacgcgtcaagagatgcaggagagcactactgattttgtggaggcatatcttgggaatgcagcagcgccaataagcatcgaaatccttcagttcttgatgtcatgctcggctctgtcattcttgaactatgcggcacagtcagatcagacaaaagtagaactgcaggttggaattttgcaggatttatttcgccttggagagggtttgacacaactggatggaatgcgagttttataaatagaaatcatgggctgctttgtacttagatatttttcggatgtcgtgatctaattcaggagttatgataataattgacactgttggatatgttcgatacctcgatatagttccctcttgtgtctctctgttcttttgatccactgagtagtctgatggcgcctagctttgctagcaagtgttcatcatcaggcaagatgtgccgacccatattcttgacccacttctcgaaagtgattccaatggagtgtgccgtatttggcggtaccacctaatgttgctggcaagacagagcgagaaagccagcagaaatacattggtaagcagccagactctatgactagggagcgagtagtttgggcttcgcatgataggattgcaggtagcagctgtgttcaacctgagcgtggctcttggagattgatcctgggacacaatcctgttttcatgagagaattcagcattaaagggctcacttcgcgaatggattcgcgtggatagtaacgttgttgattttgaatgcttcaaagtcatcaccctccttgggctgagaaactttccccttcttatcgaccttcacattcgccttctcgatatttgtaagaacatcacccccttcgtcctggggggtcaaattcaacaccttcccaaacacagtactggcgccatcaagatgtggcgccggcacgaacgtaatgaagaattgactcccgttgatagtagcgcccgttgcgccctgagagccaggcgccgtcctgtccttcaccggacgagatgccatagacagaatgcctcgcgcattgtgtcgcaatgatgggaggtggatttcttggttcattgctgccgggtggtatatcgatgtgccgccttttgggatctcgaactcgagcattggtttcatgcttgtttgatgcgcggcggggccgagagagatgtctccgccctggaccatgaatcccgggatgaggcggtgaaatggggtgttgttgtatgcgccgcatgcgcagagggcgagaaagttctctgcggtttggggtactgcttcgcagaaaagctcgaccttgaggtcgccttgggtggtatgtaactgttcaagttgtaattagcatcttgccgtaggaggtagagctgcagaatcattggaagccgtatttatatgtgaacttactgtaacagacatatttaggggattttgtaaggtaaactgtgcaagaggcggcatcgaggtaccccggggcctgatacagtgcttagtcatacttttcttatcgacgcgccgggcaatcgtcgcagatgtcccttcagttcagacacagttggctcaatttatattcaaatacgcagaaaggttctcggcaactaccttttgctttttgccttcttaactatccctgtcctgcctggtcccagccatatcctccctggcccctagccccttcctcggacaaccacctcaagaacaatgaacaatcggccggtggaacaggcgttgagcacattggtgccgactcatgccaatgaccttccgcaagaacttctcagctatgcaatgtcactagtggcacagtcccggagcttctcaagcagtctgaagccggaagaggaaattgctcggccttatgcctgcgctgaaatcgcttgcagaaggtgtgccacaggtcccgaatgaggtctttctatggctggcttgattttaagacgctaattgcttgtgtattgccctccttaggttgactcgggctcttaaattgcctccgctgctcggacgtccaccatgtcctccgcgcatatacaaaaagctttattcatacctcgaccgatctctcaactcaagctctaccggtatcaaacgctcagcaagcgtatcggttcccggaacaccctcacgtgccggctcagcgcagaccacaccgacgaagggcgcggcagccaggaacaccccttccaaggcagtagctccaacaccacgaggactacaaaatacaccttcgaagtctacacccttgaaacgaagtatgagcacagcgaaccggctggagagtccctcgaaatcggcaaaaaaggctacagcttcccgaacgaaggatgtttatgggtcaaccatcattccagacgccccagcttgggtaatgacagccgttcggactgtatgcaagattctttcgacacctgccccgcgcacaaatacctggtctaggcctccaatctcgaggaccctgccaccgcatatattttctggcgtgtcgtccgtcctctatcttacgtcgagcatgtccaatgacgaaccgggatgggaccgggagagcttggatttcctggaacctattgtgtccatcgatggatctgagaaggatgatgatttcaaagaactggtttacgccatggttgttgctgtatacttccttgtgctcgcgcgtcggcgcaaccccggaccagatgcagagacggatatcgaagcgcagaagatggataaaaagacatttattgaaatgcgtcagacggcactgaacagccttgggctgaaggctaatgaccggaggcatcgcgacgatgttgaccaatggatcactcttatcatggagcaagggtgggccaatgaccaggaatggtttgagaatatcccctatgctggacagctctatggcgaagacgaggaaggcaggtcctaccaagatctagacgaagaggatgcaacactcaggggcgttaggccgcctaaacgggcggcggctgggagtgggcctcgtgtctcgcagtccgatcatgctccgcggggtggtcttttgcctggcctggggacaatgatgcaggatcgaatcgactggctgagtgatgaccgtcaggaggactatgtgaattggaaagcggatatcatggcccgcatcgaaggtgcagcggcttaataaccgccgtgcgatgaaaggttattccgaaggggacgcagcctgctaatttaattgataccctaagatatgaatcaacatgtaatttctatattcatcctcgataagtaaagaaagcggcttcgccgttatgtctatgttttgatggtagccccttttgctctagagcaacccaatgtcccaaggcaccattctggtaacctaactaactccatgccccgtcaatgacgccaaatccaataaatactaacctcagtaccaaatactcctcgttcggtgatgaggaatggactcattgttctctgcctccaggcacttcatcgtatcgtacaagaaaaagtcgatgaggatcgcattgatgccatatgtcttttgtggtttctctacaatcttcaatttctcatccaactcatccgaaatgtcggtttcgttgttctcattgtcgtctgagatgcccttagaagggagcttttggcggttcattttgacctcagggtgttgtttttcgatctctcgtttgatcaattcaacacaccagatactcgttccacgaagctcgatttcccagtttgagcctggctcgatgggcttcaggtcgcggatatggttttccaatttaggcgcgtagcgaagacagttcagctggtgcagcatctgcggaatgcggtagtctatttatggttagattaggtttgaggaagttctaagatctgcaagaggcgtacctgcaaacatggtgatcttgtcgatgtcatggaattcaccaaagtcttcgccattgaaacaggcccagagatcggcgactaggatctgagcacgtttgtagagtcgcactctctttccgtggaagaccgtctcatcgcggaagcaggcaaagctctctgtcaatatgttgaccagtcctgcagcggagtgattggcgctgtcaatgcagttgacgaagctgccgccgaattcctatctctagttagtataggtcatagaaataaggcgggaatcatacctcgcaaaggacttcgcctgcttcacgtagacactgcactcgttcttcaaacataggaatttctccatctgttgcagatcggaatacatgtctaagtagctcttctgtgcacctctcttcatccacccagaagtcgggggttgtgattggaatatctgacgttggggtaagtactcatcattctagaagtagagttagatcagggaactgaccttcatcaagagctctttgtagagcagcaaccagactccaatagccagtccacagcttgccacgatactcaatacagaaacgctttggctcttcgtcctcctcagaccagaaactaaagttcagcaaatccattgtaaatatgaagtcgactgtgctttcatccttggtctttgggtgtagttcgtgctccgaccaggtgtgcgtggaatactctttcttctgcatcatactccatatagtttcggcagcctctttggtgtgagcaaggctgaccgcaatatcaattgcattgtcgaagacatattgagccccctcgagcactttagtttctggtggggcatcctttggtctttcgcccagtccgaaatgctggcgaagaagctctaccaactcagggtcggcttcatcgtcggaattggcttcgacctgatcatttctctcggccggaattggatccaatgatggcatgatattttctccttgtgttgccttgatcttgattcttgattgaaaacaaatggaagatatggagtcaggggtatctcctttgatatcgcgtggaaggattccggtgagaagctagacccagccgatattccaccccacctggatattcgaatcttttgaggctcgaacaagcaaggtgcgatataaaattacttgaattcgacgaaccctttgagtgaccggtgtttttttttttttcttgccacaccgagattttgtcccgatggtctttggatagagtcaccggttatgtaagcagacacaataactagttatgcccataatgtatctggaaagctctcagatatgcgatattgtggtaaatatcagtgatattgaggatttgcatctaggggcaatggctataagcgcaaaggaggtctgtacattatggtttgcagtgacacaggtctgcaggtctagattgattacctggtacctgagaaagatataactatggatagcctcgtcatgagcataaacaggcacatttattttaagattatactcacgttcattgatcatctaaaatagggcgatcagcgtatatgcgctagtatatgcgccagtatacagtgcgataatgcaaatgatcacttacaaggaccagaagatgagaaaagatcagaaaacaacgtcaattaaaactctacatctgcattttactctttcagtcacagaaaaagcaaataaaaaaaggcgtagaccgaaaggaagcggaaacccacgtgtgaggctcccagcaagtgccgtcatcgccaacggtcactgttcccggctcagcacttctttcacttgctccttctttgaccttttcccccttcgcaacttatctctaaaacagacgcgctactacagcactacactactgaactatttcaacaatacaacaccacctgatcgcgatcgtcatctactgcccgccatgcgggatagctccattaagcgctccctcggggtggacctcacccgctccctcaaagaggtaagtacagctctgctggttttcaatcctgaggtccaagtgatgttgtgtcaaaatgtattctgacagttctctcatcacacatagtcgcgcgttcttcttgtcggcgcaggcggcatcggttgcgagctgctgaaaaacctcgtcctcaccggcttcggcgaaattcacatcatcgacctcgatactattgatttgagcaatctcaatcgtcagttcctgtttcgacatgagcatatcaagaaatcaaaggccttagtacgtccaaccgaccaccccgcgcacttgcaccgctcctttgcgaatcctccccgactcaagcgcagcgcattcacatcgtgtgagcggttcagcgataggtgatatggaatactgagatatggatgctttcatctaggttgccaaggaggttgcgcaaaagttccggtctgacgcaaagctcgaggcctaccatgcgaacattatggatgcccagttcaacgtctcgtggttcgaatccttcaacgttgtattcaatgcgctggacaacatcgccgcaagacgtcatgtgaacaaaatgtgccttgcagccaatgtacccttgatcgaaagtggaactacaggcttcaatggccaagtgcaagttattcaaaaggtcagccaaactgatgcccggcttcgcaaattgggcatcttctgacgcgcgttattttagtcacaaactgagtgctacgattgcaccccgaaacaaacacccaagtcgttccccgtgtgtacgatccgcagcaaccccagccagccgatccattgcatagtttgggcgaagagcttcctcttgccgtaagatccagttccaatctgtccgctttgtatactcaccgttgagtagggaacttttcggctatagcgaagatgaggcagcggaggtggacaacacagaagacgctgataacggttggttcgatttgatctataactaggcgctgaaactgatttccgtctagcaaatgaaattgcagacctgcgcaaggaagcactggagctcaaagaattgcgacaatcgattggcaccgaggaagcctatcagaaggtcttcgataaagttttccgaagggacacaatacgattacagggcatgaaggagatgtggaaggaaagggatccaccagagccccttgactttgctcaactccaagaagaaattgcttcgatcgactcgacgatttccacggatgaccagaaagtgtggacgttgggggagaattttagtgtttttagggataggtagggactgtctgtcaccgatagcatactttcgataaactaacatgctacagcttgaaccggttggcccaacgtctgaaggaacttcaagcaaacaaccccccaggccaagattccccggccttgatattcgacaaagatgatgtggacactttggactttgttaccgcaacagctaatctacgagctgcgattttccaccttgaactcaaatcgaaattcgatgtcaagcgtgagtctatcaaataagagtgcacatttcaaggcgctcagtattaacacagcttctacagaaatggcgggcaatatcattcctgctatcgcaaccaccaatgctatgacagctgggctatgtgttcttcagtcattgaaggtgttccaaaacaacttgatgcaggccaaaatggtaagaaccaaagaagagcgcccactactaccgaagctaacaagccatttctctggaaggttttcctggaaagatccggtgctcgtgcgatcaattcagactcattgaatcccccaaaccccgattgcccggtctgttcccctgtggtggctcgagtcgaaattgatcctgaggtagcaacccttgaacacctcattcaaggcgttcttcagacggagctgggttatggcgaagaaatctctgttggtcttggcagtgaatcgatctacgaccccgatttcaccgacaatctggagaaaaagttgttcgacctcggcatcaacaatgagagcttcatcacggtatacgatgaaaatgaaccagagcgaatcaatctcgagctggtggtcattgcaaggtaagcgctatattgtcaagaatactaggcaatattgactgattgatttgcagaaatgagccatcttccaaagattccaagcccgcaacgctgcagaagatggtcgagatacccttgaagcccaagcagcctgtgcagccttctagcgatcttccaactactgccggtgatgcagttgagaccgggaagcgcaagcgtgagggctcaagtgacgaggtggagctcagcagccacgatgtcaaacggctcgctagtgtatccgctcctgactcgaagggcatcgaggctatcgttcttgaggacgatgatgagggaggtgccatcatgatcgacgattgaatgccgaaaatagaccttaccgtagcatctcacgttattaccagcagccttcgcaggtattcatcttgacatcattctcttcatactttcagcattcccctttttttttgcttactacccccttcaacctcttctgtatcatatggcataaaggcgaacctgtttccagtcaacagggttcgaactcacaggttgacgagcatgctttggatatgggcatgataatgtatgcattttggggttttgtgtctcaactgctcagtggcgttctctggtttgatagattactagaatatgacctgcgaataacaacacggccacctgggcaaagtatcaaagttgcgtttgagctgaatcctgcgggcattcctgaaatagttaacggaatggaggtgttcttgcttcaaactggccggctcacctaagaactcgaagggaaatatgagagcacgtcatatgtgcaccagttgcctcgtaaatattatgaaacacgggaccttcgcggagggatagttaccgcatttgctaggactaatggtggatcaacccgtttgattgtggatgagatacatatttgttacagctgttggagaattttgacttattgattgatattacacatctagcttggatcgaactaaactgcacttaatccaccatcgagattgagcacacaattgttggcatactcgttctgcgccaagaatacagctgcatcagcaatctcgcgtggatctccaaatcgatgaagaggaatgacatccttcagccggctcgtttcgcccggggtgaagtctattatcgaggttagtcgatttacgcacatatataggatgcccaaaccaacatacctgcaaccatgggtgtttcaatataccccggcacgatagcattcgaacgaatgataatatctttcattgaagccgacgcctccacggctaatgaccgcgttagaccaagaaggccagccttggaagcagcgtatggaactgcgccagttccgcccttgagcgcgagtagagaggatatgttaataatgcatttcgatgggggtttggtcctcgcagttggatcactccgattccgtacacgacttcggatggaagcacgcattaacgcgcgcgatgtaagtattgcgccttccagattagtacggaggattgtcgagatatcttccagctcggatcttggcaggatgtttgatatcgaaattcctgctgcgttgactaggatgtctacatttgcctagagggtaattaggatgagagtattcattgagatagatgagatcgcttaccatctccttttccagttccagcatccatgatccggcatctgagacatctccgacaagtagacggatctttccttgcgtacttcgttggttgtcttcttccggggcgcgagttacgacatcgttggtttcaccaatttctggtggtatacccacaagagagccaagctttgcggctgcttcctctaagcgtttttgagatcggccgacgaggactatggtggatgcgccttcttgtagaaatcgttcggcaatggcgaagccgatgccggatgtcccgccggtgattatgcatcttcgaccggcaagtcggtttccaggctgaaatgaaaccttgtggttgttttcatttggctgagatgagtatgaccgctttgtatatcccagaggatgacttgatagtcgactgttgacgtagcctacattgcgtgtactgatcggccttgacgaggctcgaagaaataggattggcactcgcatgcgaatcaaaggaactctcaagctgcccatattgtttcaccttgtctcaactccaagcaaaacgcgatatcgggaacatcaggtgcgtcactggggcagcttcagcacggaccaacacgccaacctcagaaggctctttcgctccacagcggtcactttcctacaactacgcggatacgcgtacttcatcatggcgccatccacggaaaccgagtttgtgactatagtctcaagcgacaaatttgaattcatcatccctcgcagcgcagcttatgtctcggagaccttacggcgcatgctttcttcgagtacgtggactcgacattcattgctacatgggtagtactaaccacgcacagataatttccccgagggtcgcaccggtgtatgtgtcttggaggactactcgtacgtttcgcccttgtattcctttttccttttcgtgggcattgctaatgttctttctctgcagcggtgtcattgtcgaaaagatctgcgaatacttttgctacaatgaaaagcacaaggaccaggtcaacgtgccagacatggatattccacctgagttgtgcctggagctcctgatggctgctgatttcttgaatacttgattcccacgtggcgcctttagcctttggtctctcatcacctcgactgagacctcagatatctcttattcttgtttcggctcacgtcgcttttgaaatgattcacggcgcaatgacacaaacattcgacttttacgataataccatggggagttccagactagctcacatatataggcttggtcatggcgtttatgtgatggcatgtattctatgggatacagtgctcttacattatgcaagtatttttcttctttactatagcagtactctggaactttgtagaagacctcttatcccatctgagcatatgcaaacggttaatacatctatggccgaatttgtctaaagatgatggcagatcaacactttccaatgttaacacgctttgtcaatctaccactggcaaagggtttggattataggagacaaattgaacaagaaatcatatcgtatcatagagttctatacttaagatggccaatatcaacttaggctggacctcgggcattccggtggctgagtcagcacctaatgacctcgagagggctggggccggctccaccggggcgaacttccaaggaagtgcccgccatcgtgaagatcactctttcatacattctgatttgcgggatgcagttcacaggagcattgctcactgtggtgttcagtctggttgtaatatctttcggcttttgaacattctatttgcttgtgcctacagttggatgcactagcagccttttgtgttgattgcatctcccccggatcgctgataagggtcacccgcagaggcgcatacaacagcgactcatcatgtcaagcggcgtggaaccctcctcaataccaacatctagtgcggctttgttacaacatttgaatacaacattatcaccggagccctctcctttgtcctctttgccgcatcaactcctgacctccccccttcgcgcctttcaacacgccgagacctttgccttccgaacggttccccgaactttcgctagaataactggaattaaagcccttggccaaactatctggggcggggctggttcaacatctggagccagcggtacggccgcaacacatgcagcggagatggctgcaaatgagttcgccgatacagctagccaggagagtggctactacattgcggagctcttgggtgctatgaagaagcttggtggattctttgggtatttgacaagtctttggtcatttgcttgtctggtggaggtgagaccccgctcttgacttgtatacttaccatgctgatgggtctaggcgctcatcctaaaccgaattactatctatgcatccacacggcgacaccttcgactaggatgggaaaggcgtgcggctctccgattgattcctatccttctcttcgtctcccaaatccttagcctgctccgtggaatccgatgtcagacatcgccgtctttttcgacaatgcgctacggatctcccgggaagcaactcgtattcgactattccagtgacgggggtgctctttactcaatcagctcgactcttttaggatgggagtccgaggaacggtcgtgcgctgctgtgaggatggcgcgcggaaccaacccgggtgtcccatatggatcattttccctactctggccgacattcatgctcctttgcttgagtcacttcatcgaaacactctcttgcgcattgcaaggcaagcctgtgatgactgagacggggatgtccatcttcgagcactcaatcgccttcgcagaagccgagtcgatgatcagtaaatctatcggactaggcctgttcggtcttcctaaacaaagccctcttagtgcgctttctggtgggtctgatgctaactcaacttcggtctttgaacttctcacaaggtcgcaagttttggaacgcatgaatgtcacacccgaactgctacttattgtattgatatcgtgctgcaatagtgcaacttcgcacatattagaagtcttcggcaagcagagcaaatatcggcttttcagcactgcattttggggtgcctgcttcatgatagccatgttgtgggggttagatggcggtccgcccgtcagcctcgaaaccggcgtgctcaggttcccgactgtttgcattgtgggattcatccctcatatctttttactgggcggcatcgtgatttgtctctcaatatacactttagcacttacaatcaccgctttttcgctgccatcggacgatcaacctgtctccctctatgaccgcttcttgatggcgcatgagaatatgcaaggctcgaaccagataaggagcatccgtattaacagacacgaagacttttatacaacgttgcttcggatcgggtatgttgccctaactgcggcaagtgaggctgtgttcttgaacgagggccaatcagtcgttgcacggcggatgacgtggttagaagaggatcgcctttctgaaattgaagcctctaggcggaagtcttcatcttatgggaactggcagagtcagaccagaagtcggcctatcgaggctatgggtttctcaagtttcgacatgccagaacaatctgcttgggagagtggctacaaccgcgaaaaaaagattgagaaacccaagaacggtactcgagccgtacaatctcgagccgagcttgggggagttggcgcagtgcgagtatcgattagattgtggcatgtcctctcgttcttccgcgcaatttccctccttatgctccgttgggttgcatatggactcaacaatgtgcttgatcgattagggataaacgctcggccaatgtggctcaaacgcatggtgggtcatcgtggaaagaagtctaataccgacaaaacgaacccatcacagccattagatttctggattctctcggaaaatggagagcttgagctccccgatgaccatgactttgatgtcgagatcgagatgaggaagcgagagcgcgcgaatcggccagactggatgggctcggatgaaagccggctagaggacagactctacagctggtggaaaattggcggtgcatggggaaaccaagatcaaacctctgattattctccgccctctgatgacttcgacaccacgagcgtggtgtccatgtctaccaacgcctcggattcagaatgggaggataacctatcggaagatggtcgtcgaacccctacccagctcgatccgtatgcagacagggcaagcccaccactccaagatcccctgatcgacatgagcacactcgcccgtcttcttgacccgcgcgaccgcgagagcagagaagaggccaggattctagccgcccatcttaaaacaaacccggacaacccacagatcatgacgcgcagtcgctaccagaaacaagttgaaagggagagatcccgaatcatcttctcatcccgcctccagcagctgaacgctatgaactcagaatccgaagggcggaaacctactccagaagaggaagctgaactcctcgagaagctcattctttcccgtcgctcagaaacctcgggcatttccgactcccatacatgggaatccggggcaacaggcctcggacccaatggtccaccctgtgtggtctgccagacaagcccacgggccattatcacctggccctgtcgctgtctatgcatttgcgaggactgtcgcgtgagccttgccatgaacaacttcggcagctgcgtgacttgtcgccaggaagtcgtaggcttcatgcgcttatgggttccataagtcaacctatttgtttcaatcgctcagtttttttagcttgcactcttttatctttggctcacataggttccatatctctgaacagtttgtaacatattacatttgaagacttttgcttcgtatggcgatttccagaccgtgacttatctattcgctaattgtgttcttgctgagaaggctggtcgttctcgtctctcctagtgatttgcttgatcaatcaatattcagagtatagaacttgctgctccaatctttttctactaagttgtcaaaaaagtcactcagctttatcaaattcgcatggctatcagtcagcactgattttgtccgtctgtctcaagctggttaagaatatcagaagtttaataacggtccttctatgctaacacaacttaaaataactagctataaatcgtccagagctttccccgtcaacgcgaagtgctttccaagtatctgccagcctcatctgccagcctcatctgccgacttcataattcttggcgatcctgcatcttccccctccacccctgttcgacatgatgtcttcttctcggcttcagctggagttaaaacaggtatggaagtcttcctatgtggtctcgggaactcaatcaagctcacgcaaggcagacaatctttctagcctgccatcccaagcccattgccacgagagaagtcgggcagctagatccacagcaaagcacaatacaccgtctggaactcgaagcagcctcctctccacccgattttccaaagatagttaccatcaaacaacaaaaggatggatgggaggaagaagaatttcgacgaaaataatagcatacaagcggcttcaaagtcttcaaggaaaatcgatcccaaggcttctaggtgaaggcttcttcaatgaccgtccatcaatctttcggaaattgtggggatgcctttgcatcagcttgcccgggacgatacaattgaggttgacgaggaagccttgcaggctggtcttttggatgcttttcggacgctattcgtaaaggaagcgaagtattgggatcagaggctagatgatttcctatttcgtctcgacagggagtacgatcaagggagagtggtgattgttgatctcgagcaagttacgtttcccgaggagtctctcccttgggaagaatctagtcaaatcagggaagaaagcatgaactttggcacggcatgttcattgatgagggctttccgccagatcaaacgtgcaacgccattgggctggactagtgggtgtgtcggttgtaaccatgagggaacaattcattgtgaagaaaatggagatctgctaattattaatttgtgaacctgtcaatctagtattgtgtaagattactatgtagaagggtaacccgtttgtaggaaggaggatacagagcttaggcaacatgttagattacttgattgtgaatgaggcctctcttgttgcttgagcagggagaaccatgactgtatgtgaaatagggaatgaatggttgccatgaaaagcaaaatgagaaagtataatctcaatggaaccatattacataccaagaaagccttggtattactcctccttatagaccagaggccggtactcagcctcccacatctggattcgaatccactctcgtagctccgattcactggtagggatgccctctgcctgtgccagtccctcctccacagcacacaaaatcacggcggtggcaatgtccacgctgatttcgcgcacatcttctacatcgggtagcaacggcttcatagagtcttgtagggccggtgaccgtgccttgagtgcctcgacggcagcgactagcatcttcttggacacaagacggcactgcgagaggactgctcccaaaccaatgcctgggaagcaggttgagttgttgcattccgctgaaatattatggttaatatactgaacagtcaatgtccgggacgagatttggatacctaccgatttcaaattgcgtgccgtcatgggcgactggcgggaatggactacccgtagcaacgagagctcgcccatcggtccatttatagagatcaaccggcttcgcctcgtggaggcgtgtcgggttgctcagtgggaagataatcggtcgttctacatgctcggccatcgcacggatgacatcttcggtgaatgctccgggcttggttgaggtcccgataagcacatgggggcgaacctttttgacgaccgacagaagatctcgatcactgtccgaccacccatcgtcgctccgtgcgaaaggtttctggccttcggtcaacttatcacccatggacttcataaggagaccgggcttgtcaatgcacctagatgaaagaatggtgttagcgggggtgtttatcttcctttttcgcagttacataccagatctgctttgatgcttcgtccttcgactttcctgtcttagtggcgatggtatctgaaacctggtcggcaatgccggtaccagccgttcccgagccgaagatcactactcgtacatcctccagattgactttgctgacttcaaggccagccaacatggcggccaatgtgacacatcctgtgccctggatgtcatcattgaaacagggtatctttgacttatatctatcgagtatccttcgagcattatccagaccgaaatcctcgctagtcttgttagccgcgtttcgaacaatagaaaggagcatttctcatacaagtggatgtaagccttggggaatcggttgcgggcagccgcgacaaatctgtccacaaactcatcgtacttctctcctctgacccggcgctgtcggaggccgaggtacagtttgtcatcgagcaactcctcattctacatggtgtcagcaaatgtagacttaaccagataataggtatacctacatttgtaccgcaatctagtacaacaggaagctgacgcgaaggatggattccagcacagagcgtggtaatagccagtttggcaaccgatatgagaattgcacccacaccttggtctccaatgcccaaaatctgccaacaattaatggtaagcagggtatcacaaactctccgtcaagcagatatataattacctcttccccatcactgacgacaatatagtcaacatcctcctcagttccaaacccagagagatactcatcaaagttatcctggtcattgatattcaagaaacacccttcaggctttctgaacaatcgcgagtaattctgaatcgcatctccctcagtaggcgtgtaaatcacgctgaacatctccttgagattggtttgcacgagctattcataggttagtaataatgcacatgctgatgttgtttcgggaagatatcagaaccttatagtacagcacatcattctgagccttcatgctagccaggaaggtattcttggctaggtcccctgctctgctttgatactgctcataagcgcgctggacctgctcatccaatgtctggatgttcggcgggaggagactgtggagcttgaatgtcgatcgctcatggtctgggaaggccgatcctttgttatatttggatccatggaggacatggtttccctatttctgtgtgagaatcggagcttataaaagaatgcggacgtgtggtcaccttgtatgggcaaatcacaggccccggggcgcggggtagatcgcggaatttagagctagagtccgacatttggagccaatgccaagggatacaacgttgggatgaagaaaagcagagaaagattggaatatgagaaagaaatggtagtggcggggtgtggagcacccgtcatcaagcttctcgccacctggacaagagcgcatataaaggcttatcatcatcttttgagaacatggtacaatctagtatatatatagaacagccaaggtatgtataaatcaaaataaagtaaacaaagaacacaagtataaacctaactttgtccttgctggtgatttacatactttttacctttagtagataagttactacaggattaagaatcctaaacctgctctagctgcctggtctattatattatatatagcttgagagatagctatatagtttggagtactttgtacaccatgagcaaaaggtgggcgcatcgcccgtgaacccccgtacgtgattattaagccattagtgacgtcatacaattgaccccgcattctcctttccatttcgggaatagcgccctcccctctaaattgggtttagcgttgtccagcttctgtttattccagccctactggtacaagttggttgatactcaagatgatgatcattctaagctatgctactggatgatgatcacgtgaagtcacgtgccggtgacaacaacatgccggccccgaaaaaaaatctcgtcccgagattgaactgttatgccgtttgggagaaccgtttcggtggctttatgcgaaggtctctctacgtcagggggctagtggttcgcgggagtagcttgttggtggttcgcggccaggggggctgctgttgatgtgacttggtacgcggtggtgtagtcactttccttgacggagccgatgcgggtcgttcttccaatggtctgagaaaagtccgtattgtttgcgatccggatgaagccgaagtttgcgtcgatagcttgttggggttattcgtcgcttggcgacagagcgtggagacttggctctgcgtggacgaaggcttgaaggatgattttgcttttgaaagatcctctttttttccaggagaaacccactggatgctaaccagacatgctaccaaagttacaagttggttgatactcaagatgatgatcattctaagctatgctactggatgatctaagtacagtgatcacgtgaagttacgtgccggtggcaacacctacaatatagaccttcattcgaggttctggacgtaaccaccccatctcacaagtggctgatacataacaagatgttacctatcgcactttgctctcacgacaccttcattttcactttacttgatctttactctctatttatctttcctggtcttacggccaaatgagagactaccatggtaggtcctattgatatgactcgatgccgcctcctataacatcctagtcttcatttacttcctagttgatctcgcatcggagtcccaacacttaatctagtattcttttcagttatctcttactaaatcttcactttgtccttaggttcttcttcctcctctcttcttgtaagccattataaaagctcttgttcatttgaagcgagagttcaaccatccccgatatgaccaaatctattgtgtctatctctagtatcaattccgttaactccctccatttgcaatacgaattcgcgatcaagtgcaagtgggttctcggagagaagaatatcataatctccggcatcgtggactattctctttggtttggacaggctgggaacctagccaccaatatggctatggtggaaaccaaataatgcgtggtggtttattcatcttcgtgacgatggaaaggtatgaaatggagatttataagaactttgggatttactgctaatatatgttctagtacactgaagacacataccactggcattcagacgcctgcgaaatcatctcggtcatttacaaaattatgcagcatgtctgcgggttggaacctccatcaaggcagggtcgcgagttgagcagacccggaaccgaatgttcccggttcaaagttgtgtcgtggacactacggccgtaaatgatactacagctgctgacggtaccgataccaatgatgaccctctgccagctaccgagtacgatgccagctcactagcggatgatatagccgatgaaagtgacctgggcctgcttagggaggcacttatcctacctaaggacggatggactacagataacccaaggctgaggttacctcgcgtactaagaaccaatatcacacgatacgccttccataccgagcgaactttcgtactcgcactctgctgcctttacgatgaatcttccctgtataccttacgttaggacaaggcaaatatatctcacccaattgatagccagcgtaacggcaagagacctggccctttatcaggcggaaagatcgatatgcctaccgtcgcgacatggttcgttttccatttctcaattcatgactactaggacaacctcaagcacaaatcccatctcgctttatcttacgttcgcctaacggacgagggcgttttctactgctcatacaaaatgacactgtactaaagaagttcgcggtttcaggctgactttgactaacacagggatattcgtacctcccgtgtgcctctggacccccttatgattgtataggccaacggattaccctggttcccggtctataaggcgttctacgtcctctgtggaagctggagccctgcgtcataccttgtgggaagaaagtaccgctctaagatcacggatttttacattggcgcggaactggccccacctgccgccgtcctgaccaaacaaagtaatgtacatgggtaactacctactagttatcgtcgcgggtttttgggaaccttggcgggtggaccaggtatctgattacaaatcttatcttatcttgactatttatggagtaggtacctactacggagtactttcactctactttcactctcttaatccgtatataacgaaatcattctccaaactcaggcataacttcacacaaggagagaaaatggctcccacgtacaatgcaagcaccacggccgctgaactagtcgatcatctcgccgccgaaatccaaggcaaggtgattctcacgactggaccctctccgaacagcattggagcaaccttcgtggagacgatcacacgctctaagccggccacgttaatcctggcgggacgcaacacggttacgttgcagcaaacagcagacgcaataaacgctgtatctccacaagtctcagtccggctgctgcagctcgatctggcctcgctgtcttcagtccgccaagctgcgtcggaggttaacagctggagtgatctgccacatatcgatatccttgtcaataacgcaggaattatggctactggttttgcgctcactgcagatggctacgagagtcagtttgccacgaaccacctcggccctttcctcttcaccaacttggtgatggataaaatcttgaattctccatcgccgcgggtggttaatgttagcagcgatggtcatcgactcagtcctatccgctggggagattacaacttccaggtaggctagcagtttcgctccccacttgcatatctaatgtgttaatgtggcgagttgcaggatggtgaaacttataacaagtgggctgcctacggtcagtccaagacaagcaacatcttgatggctacccatcttgcgcaaagactgggttccaagggccttacggcgtatagtttgcatcctggtgtcgttttcggcactacccttgcgaaggatctcgactggactgttgacctcccggcattgcgtaagtgattatcaaaggtattcagaaatcccgcatggctaatctcccctaggcgctgtcgataaatttatggggaataaggagggctggctggagttcaaacaaaaaagtccccaagaaggagcggcgacccatgtgtatgctgcgtttgagccaagccttcgaggtgagacgacgacccccattcgaccgatgtacatgctgatttctctcaaagatcacaacggtgcatatcttcaggactgccatgtagcagatccttggacggataccatcaagccctgggctacggataaggtcgaagctgaaaaattatggaagctgagtgagaagctcgttgggcaggaattccgctattgacagaacacagtagggcgtcacgagggagaataaggctggcatcgaaatgtctctcacttcaaaatataggagatggcaatgtgctgtactgtaacaatccatctccttgcatggacaagacctcggaagacattattcgccccagagatatccgctcttggcacttaaatggcatcatccatcctgcgagaaatcaagtgaagtcactctccatgctgtcggtcgcagaaaaagcaaggaaggtctcaggaataattgtgctgggcgtgtgctggcgtttatttttcggaggtagcggtgacaggaccctagtaggtggatagtcaccaccaaaaacaggattcacgtctccaaagcaggattaccgtctgaaataagtcgtacgttttaacttatgtgggcatctctccatatccttctttttttttcaatacagcctggaggactccgtactccgtagtgtatgttttcctccgtggttaggcagctgtgacgagcggaaggtccgggagaggacccctagtggagaatactttgtgggtagcgaggtgattggctggtcctggcgatatttatgggtccgacggtcctcccgaattttaataaagagcctccagggatcagtggcatcgcgaagaccctaattgtgaacgttaggtgaatagaagtctgtgtttgactaccaagtctatgtctactacacaaggaccactcgatatctcttttcccctgtttttggcctctttttcacgatcatttcctgtatcacgctagtaatgtagccgaatgctagcaatggcttcggtaagccacagcggtctaacatccaatgagtggtcaaagagtacggacacaggccaatgagagagctttgtaaaatgagggctcggagtatactacctcgctatattccagccgctaggtaactaaatagtctgactcttttccatttaaaggggcgcgtgcgtccgtcaattgaattttgcacctccatctctcttcacctctacctttcctttcttttcctacctcaccgtgtgtccaaaacatcaacatgcgtacctcctttttcctcaccgcagctctcgctaccctcggcacccaagccaaggacagcagcagcagcagcgaaatcatcggctacttctctccttcctgggacgcaggccttctccagtatggcggttggaccagcaccgccgccagcctcgtcgcctacaaatccggcacggccacatatcacgtcggctgtctgaaggacgcgcccaagaccgactgcaactacccgtcctcgtggaccatcgttcaaggcccggagacagtcagtctcgatgggaaatacatcgcctctacctcggacaagacctccagctacgagatgactgtctcccagtcgtatcattgttccctgaaggcgtcgaccgagtccgccagctgcacgatgagtgtcagcatgagcggaagcgtcgacggtgcgaaagtcgaatcttctacttccagcaaggcgacttacaccactgccccgatttcggcttcgtactaccagctgaccgtcaccgcgggcctggagtcgattaccactgagacggctacgacgactaagtcgaccggtggtgctgcgggacacgctggtgctatgattacggctgcgcctatggttgctgctgctctcgctgctttgctgtgatgattttcaagatatttcgatcataaggaattacatgccatgactttaattgactgacatcgcgtaaagatctcgtagactggatttggtaaatggaataacgccaaaagtaggatctcttgttttcgtcgtttagcattggtgtaatatcaaaggtcatttctagtttcgccccagcagtgaaaagaccttggcgctgtaatacaagtttctcggagatatatatcttacatacttagtgacgacaccgaactcgagtttctagtttggatatatatttaaacagacaacagagatcaaatcataaacatccatttcacccaaggggtaaaacaagacgtgcattgtattaagcgtgtcaactatacagggaggtaactaattcaggggtctcgcacggtcagccctgctagcaaacaaggaaacaaatcctatgccagcacaagcgagcgaaaacaccgagaacaacctcatattaggtatagatatatttacaggacgtaagcggcagcagcggcgaggacagcaacaccagccatgttgcccttgacattggcaccggcgccagtgtaggtgggcgagggggtggcgccagaggatgagccggtcttggtcactagcggggtggaggtggcaacgccggaggaggagccgacgggggaggacccagtggcggtggtaccggtggaagaggtctcggtctcaacggcggaggaggtttcaacagccgaggacgaggtctcaacagcagaagaggaagtctcaacggcggaagacgaggtctcgacagcagaggaggtctcaacggcgctggaggtctcgctagcagacgcggtaggggttgcggtagtctcagcaggggcagagctcgaggtgctggcgctaacggtggaggaagcgctggtctcgacgggagggaccgagatggggtgaccagcggaggaacactgcccaacgacggcgttggagacagctggatgagtgagttagtgggatgtttggatcaaggggagcaagtagatgggtgttaacatacagacttggtcactgtggtcgcaggccttctgaacacaaggagtgatgctggtcacgagctcggtcttctggcagtggcacttgaagtcgagcagctcggagcagccatcgctctgcaaggcagagatgaagcagctcagctggaagcaagtgttagtaaaccatattctttacatgtaggcatcggttttcttcgtaccgagcaggcgggtacatcgggcagctgggcgctggcgagaccggcagcaacaaaggcaatcagagtggtggagaacttcatcttgatgaattggactaaaaaatagaagatattatgaatggcgtgccggaaaagacagtcaagtattgtatagcgagtgcggatgagttgagaagaggagccaggtctggacttggggagctggatgccctttttataagctttgccagtcgtatatactccgcctgccccatggagatacccctgtgacaaggttgcactcagaggctggcgcgtgggaccatcacatgtctccgcatgcttaatgggaggcaatccaccgaaagcaggcttcggccgcggttgactcagatctgtaattaccacggattggctgagttcaaagccaagcctgaaggctgatgccggataatgggttcccgcagccgattgagcaatgagcgaggattgggttggtgctattgtctcgtacagcgtacgtatgcgcgcatcgccaagttgagactagatcagacgaacgagaaagccaccggaaagactggaccagtggcgacgttggtatgtagtacacttccatttgcggttagtcatacggtgattagggccattgggtttaatttccacatctcgggccagactgctagtggcctcgatggacgacggtacggtacggagtacatgtggcgtggttgtgcagcgttcctactgcccactacccaaagtctttcgtcaattggctataaattatgactccagcatatgtagatacgcaagcctgccagcattgaaagcaataaatgtgcagaaagattcgcaaaaaaagaccaatggggtggcaaaccccatagtattaggaaaatccggggaagacggttggaccccggcagggcccgagagagggtagcatcgaactataccacattgggacttggtccgacgctatttcataaacaaggcaatataatatatcttgtctgaaattgcttggggtaacacacggcgccatcaaggttatggaaagggtcaaaactcaggccacgatcaacaaccttgtgagctacagaacttgtccaatatagggtttatgggtatacagggttgtacattgtagccccaaagacatcccggcgttttctgagtttcattgggcttaatagagaatcacaaactagaaaagattaccgaaacgttagcattctctgaaatatgactcgatcgtgagatattgtacctgcatattacgatcacccccagtggcaacagggtttaaatgttacttccaagtgaaccatttcctgttatttcctaagaaaatggccttggccttgccaagtgagacatttagcgggggtgggccgactcaagacgcagactggaccagatacatcatctttgactttgacagacagtgccaagcacactagcattcatttgtagcgtggggttggggtcaataagaaagagagttcagcaaaagcagcaaaatcaggaacaaaaatacaaaagcaccgatcacatgagacacgactcctagttagcgtcgccaccgagactctgttacgggcgactaaatggaccatcggaacataactctctacagtctttctacatctgcaattgtgttgaccacctaccatatgtatactcttacaaaatcacaaggtcttacgtatgtatcacgtgaccgggtttcccccataagtaattatcctatcatgtgactggatagatacactagtcccaatatggcaagcttattatttctggaccaatcaaaatgcattcatactacactcatattcaggcattgagcatattctatcttagcatccaccttctctatcattatggcttccaaaacatacactagatgttacatttacaatttttgcttaagtgagtcctaagtgaggtctaagtgaagtctgagtgaagcctaggtgaagtccaggtggacttaagcaacctcaagaacggcatgcagcggcttgagaatgaaattcagcagctccaaaagtcatacaagctccaatctcgccaaagtatcctcatacgtggggctgagttagatctctcatgattgaccccgcccatgcagaaatctggaaatgcttcttctatcagcactaccatttgacgttcgagtattcccacgagcaactccgcgattttgtcgatgtctccccttcgatcgtaaagattttcaatttacgggctgatatatcgataccaacccgtgaatggcagaaggtcgaggtgtgcgaccaaaacttctcgaagcctacgatacgtacatcgaagccttccagcagaatcaaattactgcggctccgatggaactcctttcgctggcgaaaagtcgcgggcagcctttttgaggtagtgagaatctcctttgttttctgttttgttttgctttcatatatgataccctctttcgaaatgcttcaattttctgtagcaagatcctacttgcattttcctcaaatcactagcttattacctgcttattcctagccctattttccactactgaatagcagccatattatcctagtgactataggcataccacggcttttctagtagagaaatgtcagaactagctcggtgtccctcaaaaggcaagctgggggtcagaagatcttcaattcaatcatgaccgccgaaggtatcatttctatgaatacccataggtcattcgtatctcattaatatcccccacaaacgcccgatccatgcaagtatgtcaacgccagttcaaatcacggtcccatatgttctcaggataacaattcatcaatatatgctcgctcgcttatatccttccccttgagaagaaccgcaaggacttcgatgggcgggttgagcttcagctgattagcgcgtctccaccgcttgactcgagcaattccaatacagggctaaagagagagtaaatatgttagacgacttattctaaaagagacccggacacataccccatattggctggaaagatcgaaatgccggagaatcttttcctccacatccatgccttgctggtgggctgttgagcgcaatgagccttttaattcatactaacgccctgtgtgccaacctccacttaccactaggtgtcttgcgggcctgctcttgagcccgccaatatcgccagatatcctgcttgttcaatttcagtgcccggttgtcctcttcagatcggggcgcttggtgttcgactgcggcttgttgtcgcaccgctagctctgcgacatggggcttggagggttcttttggggtgacggacagctgctggggctctggggtggaggcagatttgtcggagagcgctggagtcgagtcgagggccttggctttgtgggatggtgcggtgactggtttggtgactcgggcccgggctccgaaggacagtgtcgactgcgacctgggtgtgtttgatgcgcgacgaggcataatgtagaataatgtggtggtttgtcgttgagattggatatgcaatgttgaagaagttaaggtggagaatgaggcgatgtcatggttgcactagcaaccaagggaaaaatctacgaaggcccggtatttagccttccatggttcttaattgggacgttttatattttttatataaattatacatcgattggcgtataaatccacagcggatgtgctaagatttattgtttatcgatttaccatgtgtgatgacgatgatgacattgacattcgaaactgggcgaacagtgtccgataaccattacgtctggtagaaattcgagatcgggtagatcttcctaaatagtcgtatatatagcatattagacctctcgagatatacagaagaacctaataataaatcaaaggaggctcaactcaatcgtggctgttggggggctcagttcatctttccccacccacagccactgtacgttctggaagcccttcacctctcctatctcgaacctcaaagcctcaagacctctggacaacttacccttgtcgccctcttccaacctccggcattcgaggaatccatatgttcacacagttcacctaacccaccgaacccttatgaaccgtgcgaaaggatccgtccactcgcatattccccacaacccgaccaacctccgcatgtctatggtgcgacagacacggcttactcgagatggccgcctttgtgcgcgtatcagggccggcaaacggcaatttcctgatcggatacccaggcatttctgcgaccatggtaagcgccctgtgatacatgcgacgagccggttcggccccctgcgcacgcggccccattgattgttcattgactgactatccaagccacgaatcgagggtaaagttgaaatcagaccctgcgctggtattacagctcccgtcaacatctccctcgtcactatttccctcctccgccgcgagacaatccacccttcggccgacacctttacgaagaagcgcctggctcccccgcggaaagagatcaccgatatcgtcggaaaagagatgctcctatttcgatgtcccgccggccgagaatacgaggaggtaatatctatggatctgccctttgttctctttattccgtttggtcgtggcggccgcgatgcctctcgccgtgtacccccagctagtttacagctcccgagtcgcaccgccgagacctactacgagatggtggtgatggtccaacaagggcagcagcagcagcacaaatatacctttcccgttcctatcgcccgctacgacacgctctccacattcggcatgtacaatcgtccagagtcggcagagcgcgtatcagatcatctggtcacattagccatatcactgccacggtggtcttacggtcctctcgaccccgtgagcgtctatgtcaagctgtcaccgaacgagagctggatgggcaaggcgcggaaggtgaccatcaacaagatcaccattggcatcgacgaggaaattgtctacaaccacgaaggcgatgagcctcagcgcaaagtcaaggtcctagctaagaaaacggagaacattggtgttaaactgccccaatcgggctatttgacaaaccttggtctggtattccccgccaaggacctccgcgacgcagaaggaatcttgccgagaagtagggcggcatttccaacgtacggtgtgagcggtttcacaaccacagcaagtctatataaaatcgagtattacctcacagttcgagttagttcttccctagttccctggtatttccccaatactcacacgacagcaggctcacttaacctcggcaagagacattaccattcgacaaccaattgtggtctgccccctcgaccatgccggctgcaaagaagaaatggaagcgatcgagcaagccgcacgagatgccgcccacgtcaacccggacaaccccatgctacctcttccagcaattgtgcgaccaaacgaccacaacgccctcagccatctaggcgccgctatcgtcggcaaccagaagaaaccattgattgactgagatggagatgatccaactcctcagtaccaacgatgatacttatttaataaatccctcccttccccccgtcttgataccggagctcctggacggtaatcccacatacggggaccgacggttgccattacttttgatgcggaggctgaaggctcctccgcaaccacgctatatcatgacatgtcttacgattgcatacattttggagttggttgcgtggcattcctggaaactggctgttcgctgtttatctgtctgggcaaaacggggattacggggtgtttgggctacttgtttggagatttggtcgagtgtttccttgcctcccttgacttctttccagtgtctccccgctgcatacgtgtattcggtcttttagccgtttggtgcttctttcattcgcacagacccagtcaagcatctgctcaaatagtgatacaatttgtatccatttggaatcatgtacctattaatctgtggatatacggagctatggatctatggtttcaggaatcatctatcctcgttgctgtgtatattgtcttttggaatgcaaaatcgcttcacaagggtatacttatgctagtttgtatgcctttccaggttcctatccccctcgaccacgaccttatatcaccaccctatattatacatgcagcttatttcccaatttccagaaatcccatggcaatgcttagcatgtctccgtcaaccacccgggctttgctcttctggctctcgttctcaatgccccgaagacattctttcaacatttcaagtatggtttggtactgcctcgaggagggtccaaaggtcttcagggcattctcaaggctgtttgatatctatattttgttatttcctgcgtttcgtagttgtactgggcgatataccttgcgcaaactttcgttatagtccacgagatcttgacttcttccgtccatctcatatcatccaacaaatatgcctgatatttcgaaatcaaatagcttgactttgtgaggggcatatatgtccaactgaccgctctcgtcaccgcctagttataagaggcaaatcgcccttagccgggcgtcggggccacctccagctccctctccacttaagctcggggctgctttagctacctttgtcccttctgacatcgtgtctttactctacgcttttcaatcaactcatctagcctcttgagaaagctccctcctcttatccaagcccgaaatgtacaaaaaaatcgtcggaggttgcatccgattatttgtggtcgtcttcgtcatcattgagattgagaattacaccaacctcattgaccgatacccgatagcttgtaaagttgcatttttcctagcattgttcggctttttatggctctatggcatgtacagagatccggagtctgaacttaatcaagacgacaaggacccccgacattgaggtttgcaagaaacgtttgcttttcgacaaaaggctggaaatatacacaatgctatgagccgatggctttccccgcgatcacaatgcgagatgatgcttttaatctggcccaggcggcttggaaatctgaccgattccttgtttcttgctgtgtttgttctcttgaatcacttcaatagcttagatcttatcctcactaatattcataacgtacttactctaccgcctgctccataaatactaatactacaaacgctagggtgcttacatgaacctagtggctcttcaacgagtcagtatcattcttactgctgcttctataactgtagtgacctatttcctgtacttaaagtagcatttctcctataggacacaccgttcgggttcgatcgacttcgggtcgaggaccctcgttactgcatattctttccaaaccaaaaagagcattgccaagattgaggagtaacagactgcgttggaattgaaaggtccaagccaatgaacgacgtccaaaactgccagcaacacggagtatccccggggttcctccgcatctacgatttcacaagaatgacctccagcatatactccaacatactccgtatacttgtaggtatcgcggaagttgtttgagcagcatttcactagttatagttaagtcagcaggctggtggaaggtgcttcgcaatggagattcattctccttcgtccttgattgagatctacatagtccgagccaaccttgcaataccccactttgatgccggggtaaaacatgttggggtaaaagatataaaaaggtatgtgtttccctgattttgggtttgaattcccagcagcacagctaaaatggttcacttatcaaggggtgttgtggccacatgtcttactctccttgcgcattcctccggtattacggctgaagaatcaagcacaaatcgtgagtcctgtgtttctattagtttctcatttcctaaacctaaccacctcctatagcaatcgtggcagatggtacttcctttgctctcaatggaaataatgttgcataccgcatccatgtagacaataccactggtgatctcttaggagaccacttcggcggctctgtcggagctcatatccctctggaagttgtaggcgacgtccatggctggaatggttatatcggacgtgtacgccgcgagttcccagaccaaggccgaggagatttcaggacccctgcgattcgcattcgtcagtcacaagggtataccgtgtctgaattccagtacaaatcgtacaagatcatccccggaaagcctgctctacctgggttgccagccacgacgggcacagaagaagatgtgagcaccttggttatcagtctatatgacaagtacagcgatgttggtgcagacctctcctactcgattttccctaagtatgatgccattgtgcgcagcgtgaatatcacgaatcacggaaaggcaaatatcacaatcgagtctctggcaagtctgagcgtggatttgccgttcgaggacctcgacatgataagtcttcgcggtgattgggcaagggaagcgcatcgcgaaaggaaaaaggtcacgtacggcacccaaggctttggaagttccactggctactcctctcacctccataaccctttcctggcattgacagagccttccgctaccgagtctcacggagaggtatggggattctcgcttgtgtacactggttcattctccgtgaatgtcgagaagggctcgcagggcttcacgcgtgcccttttgggtttcaaccctagccagctctcgtggaatctgccgcccggggaaacccttacttctcccgagtgtgtctcggtatactccaaggatggcatcggcggaatgtcacgctctctacatcgcctgtaccgcaagcatctcatcaagagcaagtttgccaccagtgatcgtcctacgttgttgaacagttgggaaggattgtatttcgattacaatcagagtagcatctacgacttggcaaaggaagccgccgaagtaggtgccaagctctttgttctggatgacggttggtttggccgggaatatccacgtctctccgacgacgccggactgggcgactggatcccaaaccctgaccggttcccagacggcctggggccgattgtgaagaatatcacggacctgaaagcagctaactcgtcaacgaacatgcgcttcggtatctggttcgagccggaaatggtcaatccgaactcgactctgtataacgagcacccggactgggccttacacgcaggaccctaccctcgcaccgaaaggcgcaatcagctcgtgctgaatctcgctcttcctgaagtccaagactacatcatcaagtccgtctcagacgtcctcaagagtgcagatatcagttacgtcaagtgggacaacaacaggggtatccacgagatgccttccccggccacagaccacgcctatattctcggtatgtaccgtgttttcgatgaactaacaacccaattccctgatatcctctgggagggctgcgcctcgggcggaggccggttcgacccaggtgttctgcagtacttccctcagatctggacatcggataacacagatgcaatcgatcgcatctccattcagcttggtacttcgctcgcctacccgcccagcgcgatgggtgctcacctgtccgaagtaccgaaccaacagactggccgcacagtcccggtggctgtccgcggacatgtcgcgatgatggctggctcgtttggcttggagctcgatccggctgtaatgaacgcggaggacaaggcggctctgccgggtctcattgctcttgctgagaaggtgaaccccattgtccttactggcgatatgtggcgtttgaaccttccagaggactcgaattggcctgctgttttgttcatcgccgaagatggtcagaaggctgtgttgtttgtcttccagctcgctccgaatgttgctcattcatggccacgcgttaggttgcagggattggatgcgcaggcttcctataagattgacgggggtgtggtttactccggtggaaccttgatgaatattggtctgcaatttcctttcaaaggtgactatggcagtcaggttgtgatgttagaaaagcaatagagggcacctgcaatatgggctcgatatttatatttgagaggcaagggctgtgagcagtcacactctttggtaggatttgactcctgaacaatcgaatatcaacccatacaagattgtccaatgacgagtttaaatacccacatcaggaatattcaattcaataaacgtgttgaacgttgatgccatagacattattctgccggacgtaaaaagatccccgcttatcgataagcgcaacttttctgatctccgactctgactccgaaattctagcctctcatttattctttgcaaacaattcaacatggcagacgcagacgaggatgccgttcgcgcacctgcaactgcctcgacagaacctgatattgacctgtccgatgagacgcaggatttccgcttcttgaaccacttaaatttgtatgaacacctctccgacatggcgaaatctccattgtcaatcgcttcaattacccattgcttacattcaatctctcgacagttttgccgattcctcccctagtatcccgcgccgcggcgaaaaagactttgagcccaacccgacagaactccaggccgatgtactctccgcttcgcgaggggccatgcacaatgcgctctcatacccccgtcttcacggtgccaaaactcgcatcatagccttctacgcacccgacgggtatgttcctccagttcaaatcgatcgcgcgacaccgaaagctagcggagaagatggaaagagctcggagtctacccccaaacccgcgaggcctttgcccaattctgccagaatatcgcctgacgcatgtgtctatgtgcccaatccgaagggccagttctttaaaacaatgggccaggcagattcgacaagtcgtatctggctgttgccagaggaagccttatatctaattgagcgaggaagtctggatatcagatggcctagcccttcggggtctacagaagacctatccgtccctatgagcttgcaggctgcatatgcgtgcttcatgggccgcggtggtctgacgctagaacggtactctgtttatactggtctcaagcgcctgggttatgcgctcgtccgagctcctggatggtgcgacgacatccagcagcaggatgcagatgctttgggttctagtgaaataacaccgcccaaaatacatggccccggtctggctggtatgcttgcatcacttttcaactggattcatgaccctcactcaacggcatctacggcaactggccctataatcggcactggcattcaccgaagttacagtgagtcacacatttatctccgcgcaattgcctcagttctccttattgacaaaattcttagtggatgtataccgcaagctcgccatcataccctggtacgacccagttaccgcgcccgagagacacccctttgataccacaccacccttccgcgtcgtattccacatctacaagccctcaactcccatcaaaaagtccgcgcttcccactccagacttccgcatcgcggtcgtcagcacacgcgaccaaactaccatgcccactatgacacaacttggtgctttgctcgaaagcacgccacttgaccctccgcgtggggagaaaatggaccgtatgatgtacatgagactgcggcatggataccgcaatgtcgtcatggctgttgtcgatcagggtgtagtcagttatttgcgaattgctgattcggcgttcgggaaggagaagctttatgagaacaagggtggacctcagggtcataagcggaattatgcgaatcagaagtcgaggaaacgttgagagactcgggttatcaattcatgccttggtcgattacaagtccgttgctggagagaaggcagcaatagcctgcagcggcaatgccgtttgtgtattagaatcgtgcacatactatggatctggcccgtatatccacctcatgtcatcttgtccggtgtggatcacagcgagagctgaaaatgctctccgcggtggttggagcaattggggttcttctttcgaagatggcctacactggtcaccgcacttcaacagatagctctcgttttgagctcggtctgattacacattggagtgaagatctatatatcgttttagcattttcactagaagaatgacccaagcttatcagctggtacatattttctgggccatttaagtaccaaggaatttacatagtcggatactactcatcaagatctaaaaaccacaatatcactgaatcataaatcataacattctctgagtaacattcccccgtattcgacgagtgactggagtcttgcataccatgcaatcatctagcacatccatagcaaattacatccccaaatcacagcctgtacatctcgctcttacttctcgccccatcaaagacacaagtattatcaagcggaccatactgcctggtaatcaccttcaatgcctcctgcgcaaccaaaccccccgtcaaagaagagatattatgcaactcgccgccctcagcccgacgcagttccttaatcgcgctggcgatctgcacgcgcgcctcctgagaaaccgccgatccatccgccgcagtcagcagagctaggatccgttcggtgtggctgttccacagcccgtcgtcgtcaacagagcggtcctcttcatggccgctcgattggatctcgtccacgaccgagtcgaggatctgcgtggcgatgaatatcggaatcagggtgtccgggacgttgagctcgttgcggatggttttcagtgttgacgcgtcgctgtcgatacttatctgcgggatatcgcggccgagcacgactttgatgtgtgcggcattcttgcagaatacttcgatatctcggtctgggattgcggaagtttggcgtctgagattggattcaagctggcgcactgttgttgtcacttcttccacgtcttgtcgcgctttggccttgtatatgttttgtagtgagacgtagtctgcagactgggctttcatgtctggtagggagcctgggagggggaggacgccatgagacgcgtggaaggttttgatggccgaggcaatgacccagaaatcttgggatgatgctgacagctgttgacactggttcatgtcgaaaacctcacggatcgagctgcgtaggctgaatggcgcgattgtcttaagtacagcagcgactgcctcatcaaaattctcttcgccgccttctgggttagaagtgcgtgtctgggaccgcacaaactctctgaactcggttttctctttgtagttgctcggtgcgttgccttcgtgagactgtttccattgctccaggaagtgaagcaggagaagtatgtagggcacatggccgtgctgatggtcatccagagtgtctaggttgttcagattggctgcagcggcaacaagctcaggccagggatttagcagacgcaggtcctgggttgattctgggtccggatgtgtctcaacaatggggaattcagccggcaattgcacagagaaggtggaatagaacccaactgagtgcaggtacagcacggggatacctagctgctttgcttcctgggtcagaggtaccagggtcgagcgtctcattggaccggaaataatcaccagcttgtgctggggcaagaagtcagggtctacaagaagctcctcgatgcgctgttttataagtcagtcaatgatcatctacttttggagacatggagacatgggaaatcacaccttgagatagtaatgtccctccacgtctggattcagttctttcagcagtcggcaggtttcctctgcacgggacttgcccagggacccttcttccaggaagaaattcacgcccagatcagactcggtgactattgctgggtcgacgatagtgaaaccgccaattccaggcagtacgagattcttgagtgtctcaacgccggcaacaccggtgacaccagtgttgtattgaccgagagggccatctgagttcaccagcaggacatgagagtcctcaagtgcttgctggccagtagctgcccacaggcggagctggcgatcatatttgcgctccttggaggttggccctgtcagggcggcggggaaggcatccgtcatggtggatagtagtgcgggggaggtgatagagctttggtttgaggctcagaacattgcctgtctatcggtatgtgatgcttctcgtgttgcttacagtatttgctcttcaatcatgcaagttcctaaatgatggagcagtggatgtcgacttgttgatacgcgactatatttaggtaagcgcgtgttgtggcctgataatccaggctgacacgcagagcctcattggcattgatattgttctgacggtctgttccatagctagtttattgtatatagacaggtttctgtccgctgcgaggaagattactcccaatccatgaccaactactacgacccctagcttggagttcttagatgatgaaatgaggtcattgccagagggaaacagatatagccagcttccatgctgttaaggatgtttatttgtgatttacccttgctttgttcattgctatagtattcaatggagttttactttataaatgtaaatatattgtggcattcttgtcggtataaagagtatactattcgggtacttgatccgatgtggacttatacttcctgttgttcataccacacgactaataatactcggttatattacatataaccttgatcaatgctattgaatgcctaggcctggactttataggggaaaaaatacctgcaagtgctaaaccgcacaacctgtaacgtgacgttatagtggccataaactaaagataactatagattctatcttttgcttaattccatttcctcctctattttcatttcccctcaaaaaccaccaattccgttataaagcgcgtctataaagaggattccatgatccaaccagccctcatctcccctcttttcctctgccgtagacttaccctccccaccatccccacactacttcacagcactttgcaaagtcctcaaagactccaatccaccatgtccaccgtgtctgccgtcgaagaagccaagcgcgccgccgcaaaggtcgccgtcgaaaaacactaccccaagaatgcccgctgggtcggtatcggcagtggtacgactatcgtgtacgtcgtcgaggccatcaagaacctgggcgtcgacacctccgctacaaagtacatcccaaccggttaccagtccaagcaactgatcgtcaaagccggattaacatccgttgagtacgacaccattccactgggaacagtcctcgacgtggcgttcgatggtgcggacgaggtcgacgaggatctgaactgcatcaagggcggcggtgcatgcttgttccaggagaagatcgtcgctttgcaggctaaggagtttatctgtgttgctggtaagttttggtctggtctaatatgattttatttgcatttgcattgtagttgcgggggtatgggatgctcggaagtagagccaacactttttcttcttttttctttctttgctataaccccctactaacccacgctcgcaatctcagatcaccgcaagctccaaccccgtctccttacaaactggaaatcaatccccatcgaggttgccccgatcgccgcccaccgcgttatcctcaagctgcaggaactcggcagtatcaacccggccatccggccatccgcgagcgccaaggaaggtcccctcaagaccgatcagggtttcttcattatcgatgcccccttcaagccattgctgatcaaggctgatatcgaggctggccaggacggtagcggcaaggatggtgtgtgggaggttggtaccttggctcgcgagatcaaggagattaccggtgtgcttgaggtcggtgttttccaaggccaaaccggcccgcaagctactgctgccggtggtattggaggtcagcggcctgtcgcggcctacttcggtatggctgatgggacggtcgctgttcgcaaggccgatgtctagtggttggactagactacgtaaataatgtagatgataccaggattttcttttttgttaaaccttgggaaaaaaatgccatgattaaatttaactagtaaaagcttgcgattgtgttttggaatttctttttaattggatttcgcgtgtggtatcaacattggaaagacgcttcatttcagtatggaatcaagaaaaggccatttcgcctggacctattttgcgctcttactcttgcctttggcctccgtttcgcctaactcccgaacgtaaaccttcactgtgccttcggggacctcgtcatggccgtcttcgaatccaggactgactgcaatggccaagtgctggccactcgcactgaacgcgagagctgcgacgctatgttggtatttctgatattgacggatacggcgcttagagattccatcccagagcgcaacaacaccatcaccaccgccggacgcaaaggtgccaaagatagggtggaaagtcaatgcgttgacagggtagacgacgtccacgccatcgtcgccggtctggcggtgacatttaaaagcgtatttgcgggcctgagattcaggcgacgggtcgaaccattcgaccgcaacacgaccctcaatgctagacgaggcgtacccagcgtcatcaggcatgcaggcgacggcgcgggtcatgaacttcaagctgctctcacggcgctgccagggctcaacttcaactcgattactgcttgggtcggcgctatctgcttctgcggtgagaagggccagtgctttgaggtcgtagatgtgcaatgcgcgcgatgccatcgccacgaccagcttcgtggcagttgcggagattgagaatggcttagacgggaggggaacgataatcggcagggattcgaggtttgcgccagtatcggcttggtgaatgtgcagtgtggagtcccacgaggcggagatgacgagcttgtgctcgcggctgtataggacatggcgcacgccagcttcgtggctgctgagcacggtctgttcggaggtgttgaggtcgatcctgattaattagtatattccatggattacaagcggggtgctgatagtagcaggacccaatggaaacaactcacttcctcacgtcccaatccagtccagctgtgtagatctcattctcggtctcaccgaagcagacgtccaggacaggagcgcggtgctcgaacttctgcaatagctttccctctccaaattttccattctcatcccgcaagtcatacagatatgcgttcttatcccatgaggaaaccacgagtcgcgcggagttggggtctggggagaacttcaaggccgagatagcatctgtaggtggggaagccaaagtgaattgatctgcgacaagaaattagacatgattcaaatcaaaaagcaacgccgagaactactcacgagaagtcatcttgggcgagctgcggagttgcagaagatcaacacccaagctccccggggcccttaaccgtcttcttttctgccatcgtcaccgccctttgattccccgctctacatcgataaggaaaaaagaacgtcctgacatcatttgcttttagcacaaacacaattcctcacatcttcgtgatattgataagatgccttttgcccagctggtgattggtccgccgggcgctggcaagtccacatactgcaatggtatgcatcagttcctgggcgcaattggccggaaatgctctgtcgtcaaccttgaccccgccaacgacaagacttcatatccatgcgcgctggacgtacgtgatttagtcaggctagaggacatcatggaagaggacaagttgggtccgaacggtggtgtcttatatgctcttgaagagctcgaaaataattttgactggttggaaaacgggctgaaggagcttggtggtatgtctgacatgtcctggctgcatacatttactgactggtttgatgaattctcagaggattatattcttttcgattgtcctggtcaagttgagctatttacacatcatacttcattacgcaacatcttctacaaaatccagaagatgggcatccgggttagtggcagcaaatcttccagcggaacacaaaggaaagtcagctaaccagactcctcataacagcttatcgtcgtccacctcgtcgactcctacgccctcaccctcccctcaatgtacatatccgccctcctcctctccctccgcgccatgctccaactcgacctcccacacataaatgtcctcaccaaaatcgacaaccttgccaactacgctccactccctttcaacctagactactataccgaagtacaagacctgtcctacctactcccagaattggaaagcgagtcctcacgactttcacacgagaaattcggcaaattgaaccagactatcatcgatctggtcgaggaattcggactcgttgccttcgagacgctggccgtcgaagacaaaaagagtatgatgagtctcttgcgcgctattgaccgtgcatccgggtatgcctttggtcccgccgagggcgccaacgatactgtctggcaagtggctgttcgggagggcatgggtgtcacagacgtgcgtgatgtgcaggagcgctggatagatgccaaggatgaatacgatcggcaggaggagatggatttagaggaggaagttcgtgtgcgcaatgcggcgagccaggtcgaagcgacgggtgccgtggatggcggacctgacgaggatgacggccatgactacgacgaggagttggagaagtggaaaaaggatatgccagacagtggcgtgcgggtgcaccgcaagtaatcatcctgctccaatgacttccgagctgttttaaacgtcagatacgatacgataaatgtataatagccgaaaataaccatgcataatctaacgcaccaaaaaccggggtatctcattaaaagaaaataaatgtacagtaaaactcatcctcacacaatctcaatcatccatcccctcattctcactctcgtccataacacagtcaacgacatcagacccaccaaccaaccccccaagaacccccctctcctccgcctctttaaccctaacaatctcccgcctagccctccgaatagcctcctcctccgccttccgcatcgtccccgaaacccgaaccacgcggaacacacacccacgctcacgtcccgtccccgcgcgtttctggccattcgccggctccggaacgccggacatgtacgtaagcgccgaccagacgaggcggaaggaggcgcgcggacaccgtactatagcggtggacgttgctggcgagaggtattttactatatggtgtggttagtggttggttctatggatgggggagttggatgtgagggcctagggaatgaaaacttactcgttattccgccagcggaggcaccgcctagctttccgatcccccagtcgccgtatagctctgcgacagactcgcggatcattttcgctaggaagccttgggttagggcgtcggaggttggggagtggattgctagttgggggatgtgcggttttgatgttggggttgccggccaggtttttgggtctgggtaaagaatgtccacgaggaggtagcggtttttgaggcggaccatgacggtgttggtgtggttgtattatgttggtggtgttgacgtgggttgggttcgggttgggttaaaaggaggcgaaacttgaaaagcagtacggatagggtactggtggatcttttgagttatgcgagagctgggtatagacgtagttgctgagtagatttatgtcaaggtggattaatcttgaagctgtgaccaaaaatccactaagcctaattaggatggatagatatccatgcatataccttttcgaatatccacgtcaactcttctcgtctcgactctgctcatctcaaaactcacctatctttttcaatatggctgtttacacccgatcatcccctcttgttcaacaaatacagcaaagttctccatgggtagacatctacaccgattctgctaccagccctctccgtgtccgatcagtcacgcataatatcagttctgtctcacatgcacacccagagcctagaagatggcagaacccaggtggttgggggccaagacatatgaatgacacagctccttttactttgtgggacgacactggccggaaatatcgtttgccaactaaagaggaattccagtggattagcaagaagtttggcgacggaaagatctccctatccggttggtttatatgcattgcgaccgataacccgccgaagccggttcctcttacactaggatgcatgccggtgatgtttgtcggagtcaatcaaagctttcttgagcccttgcccaaagcaccttatcctaatccacgattaccggacccttgtcccgatctacgctggccagcaatggaatttccaacagatgcagataatatcacttttctcgaagcactggagccgttggcccatgtacgtgctgttatgtatctgccttcatggattatcattgagcttgagtatggagattcccgagtttatgaactcaagtcccttccagggattgttgctggacgcacagctctttatcaccatgcagtagctcccttccataagaagatgaagaatcttacccgaggccaacagcttgatccagctgaatcccagactagcttgagaccgttaccgcaagacactcacaattatcttcagtactcatttctttctcctggacacagaatcgaatctggctatagcctatcagactccggctatgagtcaacgacccgtgcttcgtctgctggagtaaaactccgcaattcgaggggagaagaggccctaagtatcgcttatcacggcttccccatttcctcggaggtctatcatctagatacccaccaggaaataattggagatgtgatcaatatacgacctgaactagatgtggccctcgttaaaccgacctctaccgcgtccacaaagtttaagaacacctgctattttcaagcacaaccccctaagacgttgttagaaggaaaagatatcagggcaggctcatgggccgaggttgatggcatgagttcaggcttactgaacttgctatcatatggaatgatgaaggaaaaacccgtgtctggctctccaaaaattccgttcgcacagtggcggtcattcaatctccagacatcttggggagttgtgaacgaagtgatcgctaaaggtatctgcggcgcaccgattgttagctgcgataccagcggggtgaccggcttcttccatctttttgatggaatgaactgtcttagtgctactctcgatgatttggtagctgaaggatggcaaattgcctgaatggccagagcaccgatggttaggagcactgatgctcatattcttacgagcagtatctatataggtaagcccaatccaatatttaatctagcggctcaacaatgtataatgctatgtaactcttggagaggaagctatacaatgtattgtactatctggactgctcgactggccctccacaccatctaaatgcctttctagttgcctatttgaactaatgatagtagtttttcggtactctttttatgtctttttggcatggttgaaaattgcggccggcggtagatatacccaagtagctagcggggagtcttttcccctgaacataacgaatgctatggactacgcagaaaacatctatgcggcaatggcacgttcattatttcccaaataggtctagtcatctactgcaaacgaattaaatcagatccatagcctggttgcacccttcttgagtgtcaacctgtcaacttggtcatgccacatgaacgcaggtacatcgatacacataactgctcagaaaacataagaaaagaaaatcaagggatgaaccatccaaactccaccgtcctgaacggacggactatatgccagcggacggcgttgcaaacgtcataaacaaaatcacaggttgacctcaacacggccctcggcaccacccttctgcagtgtggggaggaggtaggtgatatcatcccaagggtggcggtagagaccggtgcgcaggcgcttctgatcgaggtagtgggcaataagaccgatggagcggccgagcacgaacagaccgttgaggacacccatgcgcatgtagtcctcgcactcctctggggagaaggcaccgcagttgcggaggaggtcaacgaagcagacagccacacagccgtcgacgttgaggatcaagttgtccttcttagaggtggtgacagtctccacggcgatagcgtagtcgagcagcttggtgctggggaagtgcttcttgacaaactccttgacgagctcgacacggagatcggggttattgcgagacttgaccttgtggccaataccggggataagcttgttctccttgcgcatggtgtcgacgaagtcacgggggctcagacccttgtcaaaggccttggtgaactcctcagcggcgccatccagggcaccaccgaaacgcgatccgatggtcagcagaccggaaacgagagcgctgataaggtccttgccagcacgggtggtgatgatggtgttcatggcaccggagacggcaggaccgtggtcggcggtcagcatgagaaccatctcgaggaacttgctagcgtaggggggcaggcggcgacggaaccacaggagagacatgacaccaccaatgccaatatcctctttgaagacatcggagatgggcataccggcatagagcagctcctggccacggtcgtcggagatggtagagatgaaggcagcgggtttacggacgagaccgagctcctgggcccaggagtagtcgatgggaatcttgggcaccacgggctcgggggcggggacgatgttgcctttctggagctcacggtcatagacctccttgagaatctggggaaggtcttcgaaggtctcggggacgtgaatgccagcttcacgcatggccttgttcttggtaacggcagtctcgagatcagagttagcggaggcaccggcgtgaccgaactggacctcggtcttgaacaagctggcgcaagttccaatagcccaggcgacgatgggcttggtgatggtgccgttcttgatggcctcaatcacacggtactcctcaacaccaccgacctcaccgagcagcaccagaatcttgcactcgggctcggcctggtagcggagcaagtgatcgatgaaggtggtaccggggtaacgatcaccaccaatggcaacaccctcgaacacaccgtcggtgttctgggagataatgttgttcaattcgttggacataccaccggacttggagacgtagccgacagaacctttgcggtacaacttggaggcgacaatgttgtccatcataccaccggtgttgccgatcttgaacgcaccgggcttgataccaccaacagtggcgggaccaataatggtgatgcccttctccttggcgatgaccataatctcacgagcacgctttgatagtcgttagcaatacatccgagatcacacggggagaggcagaacttacacgctcgggcacaccctcagcaataatagcgatacagcggatctgggggtactccatcaactccagggtagaggtgtagacggagcgagaagaagcgaagttgacaacgacgtcaacgtcggggtgcttggccatggccttctcaacgtcctggtagacggggagaagggtctcactggtaccccagtacatcttgctgacgaactggccaccgaaggtgtagataatacccgctacggaaggagtcgaacgcttgcagatgaagtcgaagtcgagcatgccctgcacggctcggggttgcataccactgatcgctggtcagtctcttatttcgagattgtaggagcagaatcgcatgacttactacacgaagcatcgtgtcttgttgtggaaaaggctgtgtagggcgggcgagaggacacggctaggaggggcgaagcgggtgatgttgtcgttggcagactgcacgccgttgccagcggaaagagtaggggagggcatggtgaatctaggtctcaattagcatgccagttggattgcgaggcaattggccaatggtgcaggcaattgaaaagaaggccgtttcgatggtggatatgcaatggataagagggggaagaaaaagaagttactcactttatgcgttaaacaagccgctcgatgcgaaattagggtaaataaagaaaaggaggaaggggaggaggtaacacaggagaggatgagaaggagaagaagctgttgagaaaaatccgcggggtgagatactcggagtactcgcagatacaccgtacagctcgtcccagaccgctggactcgagcagctcaacacttggcagtcccgaaagtaccgggttcggacgataccgtacccaccggtatggtattatggtacaggtaatacgaagctatctggagtatgggggcattattggaatcctgatgcgatagtacatccatgtgtatacgtatgtatagttagttatattctaccttgaataagatagtatatatagtatatgtagtctttttcttcccatcttactgaatctgattgaatattaactcgaactatgtaccgttatgtactatctatcataagtttatccgtgtagacccgattccggaaagtcatgacatcccagtctctcgactcaacggaatcggagtcaagtgtatactccggatatacctcatagtcagtagcaccagtggcgccaccaggagtacctcgcatgtattctcaatacacgtaacattgtggtggagacctcccaacgagacctttccccaccttcgatctccgttcctcaacaggtgggaccggccgagttgtacgctgtaatctccagaacaacttttcctttttttgtgtacgccgtacactacagtacattcccacctttttccctctcactttcttacctcccagtccaattactcctctttatcctttcttcttctctcccatctcccatctcccataatctcatcacatcatgtccgccaaatctatcctcgaggccgacggcaaggccatcctcaattaccacctcactcgcgccccggtgatcaagcccactcctctccctgcctccgcaacacacaaccctcctgcccgcctcgcatcccttcacttccccgaggataaggctgttaaggatgtccttgaccaggcggaggtctccttcccttggcttctgacccccggtgctaagtttgtcgccaaacccgatcaattgatcaagcgtcggggtaagagcggtctgctcgccttgaacaagacctgggctgaggcccgggactggattgaggctcgtgccacgaaggatgtccaggttgagactgtcactggtgttctccgccaattcctggtggagcccttcgtgcctcacccccaggagactgaatactacatcaacattaactccgtccgtgaggtaagctttctccgcatttcgagcacaattgaaaggaaatggaagctaatacccaattctagggcgactggatcctcttcacccacgagggtggtgttgatgtcggtgatgtcgatgctaaggccgagaagctgttgatccccgtcaacctcaagcagtacccctccaacgaggagatcgccgcgaccctgctgagcaaggtccccaagggtgttcacaatgtcctagttgacttcatctctcgtctgtacgccgtctacgtcgactgccagtttacctaccttgagatcaaccctctggttgtcatccccaacgctgacgccacctccgccgaggttcacttcttggatttggccgccaagctcgatcagactgctgagttcgagtgtggtaccaagtgggctgttgctcgcagccccgctgccctgggctcccctgtcctcgcctcgaccagtggcaaggtcagcatcgatgctggcccgccaatggagttccccgcccccttcggtcgtgagctgaccaaggaggagaagttcatctccgacatggatgccaagaccggcgcctcgctcaagttgaccgtcctcaacgccagcggccgtgtgtggaccctggttgctggtggtggtgcttccgttgtctacgccgatgctattgcctccgctggtttcgtcagcgaactggccaactacggcgagtactctggcgccccgaccgagacccagaccttcaactacgcccgcaccgtgctggacctaatgctgcgtgcccctgcccaccccgagggcaaggtcctcttcattggtggaggtattgccaacttcaccaacgtggccagcaccttcaagggtgtcatccgcgccctccgcgaggtcgccaatctcctcaacgaacacaaggtccagatctgggtccgccgtgccggtcccaactaccaggagggcctcaagaacatcaagtctgtcggtatcgagcttggcctcgacatgcacgtctacgggcccgagatgcacgtcagcggcatcgtcccccttgccctccagggcaagaagaccgatatcaaggaattcggcgcataaacagtttaatccttattttatttgttctttgcagcgtgtgtccgttgcatcggtttgtggtataatgcatggcatgatatgacttgttttttgcgggattccgggggaggtctgcgggtgtagatgtcaccccggcgtcctattttgctgagggtatggcgttacttccgcccgggcgacaagacccggtccttctggtgccgacgtacatgattctccgttgattagatttcattttcctatgttcactcccggcggatttagatcgagtgatgtccgtcggataatatcaatgatacgcatttattgtcccagattgttccattgtagttttattatatgtcaacatgaagccagtagatcagatactgtatacgtccagctaaaacatgtccaatgcgaaagtaaacatctgaaaacacaacaataggacaaaccactgcccaaaaataccagcgtaattaatacatacagatacacctgtaattttgaataagctcacatccacgacccaaaagacaaacaagctcccgcaccagactccacacaagctctcatgcaccccggattgccagggccctcagatcccgcgatcagatccgtggataaagtagggactgtgctggagctggggaccataccgaggtgtggacgcgacttccgctgccccgagattagggcaagataagcatcggacgaacgggggctaacttgttcttatattcaaaggggattagtgcctgtggtgcttggagttgggttgggaagtgggctaatgggatataatatgcgttttcttcatgtaggttgctctttcttgtctgttgagttggtgattgtaggtggtggacggctctggcgtatcatcacttacgcgtgtaatttatgtctagctgcggccatggccggatatgagtgctggtttgaaaccattggattatcatgttggatcagttagactgatagaaggtttctttgttgtggatatgctctaagaattcgttttatattgacgggcgacgtgtgcctgagccacggtacaaagaagccaggccccaagtagaagtggcagagctctatatgtggtatattgttcgagaagaggaatcgtcactcgatatatttcaaagggctagccaggatcatgtctgtactggctacataatcagatgaacctatgtgcatagacaaggtcatttttagttgtgattcaatatatatcttgcccgatatcatataaaatgtagtatctgacacttaccacaactgactacgtgatacaattattactcaatggcgctgttcaatcaccaccagcaaccgatgcacacccagtacgctatgttgttatccgtgagatatatctcctaaccacttcgctgtgagtacccttgataacgctaacgagcagatattgaacagtctaagaaaggtcgaagttgcgaggatcaaggatattcagaagcatcccgaatatgactagattgagtgttgcattgccatttgtgacaaaacctagtctccaaagttcgaacgccattcgatcagcgactgggatcgaccgtgcatgcaagggctatgtgctgaaaatgtacgatctatacccttgaatagagaaatgtggggacaatgtgcgtcaatattacttattattactgcgtgattcaagggattatagatgagatgggaaccctactcggactattcatcgcaacgaactaggttgattgaattggtgaccggccagcatggcagtttactagggtgtaaccctccaaggcatttttagaattcgccatcactcttactcccttcggcttcttttgagagaaatagttgttaatacgtcacacaagctctcggcctcgacggaatggggtggctttctccaacctagaccctgaatatataacacactgtccctggccgtagtgaacacgaatggatcaatacagagaatataattggatactcgtctatctatgagtctgagccaagtcagttggatatgtagatcaattgggtcagccagccaccacgattgctttccaaatgtggttagtctatagatggtcttgctatctggtttcgatcctagaaatgttagaagtgtaggagtcggcaattccttatctaagaaagaaaatagaagatagtacgacataaatagcaaagatccaggaacatcgataaagtattatagacactagacattgcccgaggaattagggcccaccgtggatctactctccgcgcgaacactccgattcaccaatcagataatctcatgcacagatcctagtcccaataaagcccttaaatgaaaccgaaagggggaaaaaaataacttcacttttctttaaaccccatccgccatggaccggtatcaatcaaacggacgactgctcgctttcttcgtcctccagggtctcattccctcggttgtcctaatcacaacacctaaacggtccgctatacgttatctgtctataccatgtatgatatggatcgtgttgcatgcgatgtacccaattcagggaagggggttcacatcgacccatctcctcgcaagttgtgcaacattcgtcttgacagcactagatcttctactgatcaacccacaagccgggcgcgacttcgtcgacgcaaatggaaacatcaagagctttatacctcgtctagtcgaggctgtccggttaatcacattcacgcgggctgttaatacaccccgacaagtgaagaacgtcccgcccttcccggcatactacaccaagagagatcccaaggtgatcccacgaggtcgcttcttggttagagaaactgctattgctgtctggcagtttctagttctagatatatgtactggtctgatcttgaaacaagccatgaatgaccaagacgaaggaaagacaagttcttccggtatcctgggactagagtggataacaaagactcttattcaagttgccattgcttggctcgttgtgtgtcgtatcctgatcagcttctactaccgcgtcgcttcgatcatctttgtcggcctgggggattctcctttgaacagtccgccgattattggcagaacggcggatgtatatacattgcggaatttctgggggtgagtcgctcttatgcttattcatttgattggatcaatttctcatgcttctcaaagaaaattctggcatcaaatgctacgactgcccctcacgtcgactagcaatttcctagcgcgggatgtgctccgtctgcccagatcgtcgcttgtggagcgatacaccaacgtgtttatcgtgttctttttctctggtttgatccacgtcgtactcgacagtctgcgggatgtttcaccgcgggatcctgcgactatgtcatttttcctctctttcgttatcggctatataattgaagacggtgtccaggctctctggaaacgaacacgcgggtcccgggacaatatcggcttgccgacgtggtggcagaagactattggctattgttgggtcctgacatggctgggggttacgtctccttggtatttcaggacgaagatgttaaagccggaacagcatatggtttgggttcctttcagcgttgctgggctcattagtcctcttttattgaatagtatagtcattggcggtggtcttgtgttgaagttcgtatttgagggagagatttgaaaggagagagtgtggaatatactggatttcgaagtttctccagctagatctccccggggaatagcgaagcacgacaatgttgtacgtagagaatatatgacaaaaaaacccatcgtacgctgatcaagagatcaactgatactaacgtccgatctttgagactagtacctctaggcaataataataccctgcctagaatatctacgaaggaaatgaattagatcaaagaaagcaaactgttctgactgcgaaacgtaggtggggctctgttgagcttctgctctacataaatgatgcaacatcccctaggcatgagaataataacctcaacacacgtgcggaaaacattagcctcaactgtcattgcgaagcagaaaaaagaaaacacctcagaaacaagaatcaagtccagggtggcatagcttgtccggcagcgtacttttggctcgcttgttgaatcatccgggcaatcatctgatcagcgggatctgttcgtccatagatttgaaacgccacttgcagtttctccagccatgtatcctgggctagagccaaatcagcgatttcgtagttgtattctgactggcaccagaacaccggtgtcaccgctccttgctcgactaccttgacggcccaatcatctaacaatccttcctcttcgagaaagacaaccatcaggaggtgaaggaccattcgagacataagcggtatgttgccggtttccgcagcagctttgagcttggggtcgacaatcagcgttgactgtgagctttgtctttggccgtccaggtccactgctcacgtaatgtagagtattccgcgaatcaatcgtcgtcgcaggtcgctgagtccttggaacggagttccaggcagacacgctttgcaggagcacacaaaccccagggattcatgacgctcatgtctggtttgagctttgagatctgggaagtaacagaagtaaatttcctcgccagcctcgatttttttggtggcaagaagttcgataaacggccttgggtcacttggaaccctcgcgttgggtatacacgaatgattgaaccgcgagccaagggtataaaaccctatagacttaagggcactggtaaaatagttttctgacaaagtctcaagcaaacctttaggttcctccgactcattgttttgaattagtagagattgtaccagctccgtgggcgagagttccataacggccctaaaaacatccaatcctgtgatatcaacagaggacttctgaatcacgaaaagggccttttcttttaagatcagggatcctcgttcaatgcgttttgtggcgaaagcaccccatcctttgcctggagagggcttcagctcgaatggtgcatcgtcagggtttgagcctgcgataagctaaagcggatagcaagttagaaacactctctagcaaatgaacagggcaacgtacgacgatttgcagacatggtgttgtgtggtccggtacgctgatggtgatggaggaaaggaaaggaatgagtgtgggattgcagacctggataggccctactacctaggtcgagcatataagtctgtttgctttcaacaaatgctctttgtttgtcaaacatcctagaaccaactaacgaggagaaattaacaatggttatttttgattacgatacttgaaacgaaagctgtttattgtcatgcaagtactatgtaggtgaaaataagggcctttactttctgaccatgaactgaatcatatctagctcgaagactaaggtcctggtcgaagaccggtagaaataactgctccatattcatataaatacctcaaccaacagataaacgatcaacgcccaaaccgctgcgtgatagcatcaccaggaggcaactccgaggagaaagtcggagtccgagaaattcgtggaagtcgagtccgatgttggggagcgggatctcgacctttgcctagtcagaagcacattagccggcatgtcttggagaccttggttcaacacatactatttcgcccatcccagtctggccgagcagggggaggcattggggctccgcgaggtgtcctcttccttgctcttttggaactaccagtgccgctccgttgattccgataaagctgctcgactccatctgggttgacgggaaatgtgggagtcttgggatgtcgtataatcgggacagaaggcaacgttgaggtattggacagaggaatggaggcagaggcacgttcaagagcagaatcagggacaggagcattgagcgatgagagagcttgggagactgtgtccgaggctgcggtttgcatccgggaccgcatggcacgagctttgaggaggttgtagagattggtcatttgagcgagtttattgttcttgtcgcggtacatatcattcaattcctgatttttcttttggaggtcttcttgggatgattgcatgtctgtagtacagatgttagtcagagctccagttaagagtggactcaattggaccgaccagataacttgttctgcagtgacatgatctctgtgttggcattgtgaatgaccttgtccatctgcgtgttcaggttggtgtacttctccgtcagcgtcttcgctcggtattcctggtagaagctgctcgagtcagccttagacaattccacggtacagttttataccgaggaagtgagacatacatctcctgtgtgctttggtatgcccaaaatgcaagtgcgcgaccagcacattccatgattgtgttcggatctaacccactcaacacgcttgttttgtagtcctccgtcggattcaagattgtcgaaacagcgtcatccggattaagaagtgccgtttgacacgcaggacagagccgattgctagtggttggacgagagagtccgaggctctctgcgcatccatgacagaatatgtgtctgaaatcgtcagtcttccgcctaagctgatccacgagagagttacttacgagcaggttgtcaccactgctttctctttcaattctgctcggcatttgagggaattgcatcttaaagaaaagtccatggtgtcgttgcagatgggatgcggttggagagcataaccctggaagaagtgaaggtcacgagttagcattggtagatgttagtttagtcaaccccaaaggaaatcttcaatagaacaacaacttggacagagaacatttggtatttgtctattaaaatgattattttcataaatttccgcgggctagaaaaagaatgtatttccctgagcatcgcgccgtgttgaagtcatcttctcttcaaactctttcccgggctcatactcatgccacagactagctgggtagatatgcttgtttttctcataccaccgtcgatctacgaccttggtttctgagaaatccttgtctgcaccctctagttgatcgtcactaggtcgagacagcggatcgtccgtagaattggtggaatcggtaatggggggtttgttggaataatcaaatagcaaaccaccagctcgagagagactgggcactcgattggcgatgaagtagtaaaactcgtaatgctgtgggaacattagactagatacttaaccaccgagaatcctgacgggtgaacttacatgtggaacgataatatcgcccttgacaagcatcaagtcgtcgacgctgactcgtgcccactctcggcgattgtctttcttcgccttggatgcaccgctggcaccacgtacgcccatctcagcaccgactttccggcaccgatccaagaacaaccaaacatggtcacccttcttaactttgacagctccagctggtatactcgttccatcgtagaagacaaatggaataagaatatcagtattcttaacagcctcttgcatgatcaagaactccttacggagagtatcgcgagcgagcgcttcagcttccaaggcagcctttgtcaaagctttgggtggagggggtgcattcgggtttgctttcatgcgtcgagtactgttctcggcgggtgttttcgaacctgaccgcgatacgcttgagtcgcgtggagttgtcgcggattcttccccggtctcatcctggtcatcaccgaatgatagtttgctttttgcgaaagccttctttttcttctttttcgggggaccgtcactgcgagaaggcgttgacctattgcgctgcgatcagctcaaagaaatgggaatgacaatcgaggctcttggcttacccgtcagttatatcgcctgcagagggagttgcgcttcttgaattaccagatgccagcagccccaaagacttgtcatgcgcctcgcgctctttcgcctctagaacatccgcgcgccgcttgcgaaattcggagagatgaacaagaccgacggtttgttccttgagcatctcctccgccgagacggtttggcctgcgaaggaccgtggagtggatgtgctactctcatcttcttctgccattttggattgcgaagataacaagctcaggtttggctactgagatgagctggtttgtgacgtctggtgctggcacgtgatcttgaatttctgtatattctacaaaatcactatattataagaagtattcacgctttcaaaacagaagaatatcaaatccttcatctgtaagctactttgcattcactgaatcttagaatccagaacattcaagcgtgtcatggtccctgtttactccctttcacatatttcacctctcacaccgctgcaaacaagacaaactcggttccatgcgcgcaaccttcgatctcgatcctctttgatacaactttctgcagcatttacccgtcaaattgaaattcagaaattatggacgaagaagaagacgacttctatgatccggtcgacgcggtgccgacaacgcaatcgctgaaccatacacaaaatgcagcttcaggccaaccgcagagcaattacatggaagaagacgatgaggtagaagaagaagatgatgatgtacgcgcttagcccacacctaccttcaatttttccttgctaattctatctgcaggatgactttaatattatcacagaggcacccgaaggcgcaccagctcccgaagcgtgagttcgctgtgattgcgcttcttgcactcactcttgctgatctttctagctctcacccgcgccatgcaagcttacgacaagaaccacaacggccgtcctctgcagactcgtcggggttagcgaggtctgcgacgccatccgcgattcctcgatacgaaacagcgactccgattcccggacacccagccggggccgcaagaccctcctcagaaaaaccaggctccgcctatccagccatccacagttccaccatcgacgtcaatgcgaatcccgtccaccctatgacagggaagcctatcatgtccacggacatggatgccgacttcccatccgacgacaagccctggcgccgacctggctcagacctctctgattacttcaactacggattcgacgagttcacatgggcagggtattgtctcaagcaacaaggtgtcagacaagaagtcagcagccagaagagacagatggacgatatgcaggccttcatgggtatgggaatgcccccgatgcctagtgcgccaggtcccgttgccccagtcagtgctgcgccgcccatggctggcatgcccggtattccggatatgaaccccgatatgatgcagggtatgctggccagcatgatgtctcagggcttggacccgtccaatatggatcctatggctttcatgcagcacgctcagtcgatgatgcccggtgggggtcagcagagtcaacctggctttgggggccagccccagggtcaagggtttaaccaaggggctcagggtcaaatgggctatggcggatacgaccaacgtggaggttacgggggccgaggacgtggccgaagatggtagtttgatattgaattcgtattactgttcaccctcggaataatgggatcacacggcgtttcatgcatacaaagggaatgacaatggtactggacaatttacgaattcgagcttcttcagaagtagaggtgtaggttgggaatggatgtacagcatacaatgtagctgaaggatggcttaggcatgtcaatgaaagaaccaataacacctaaacatcaagagataaatatttcaacagaacacaagtgattatatccagagacaaccaaagaggtccaaggaaaacagggctgttcggaaagaagctcatggttaagtcttggcattctggaaatttctccagtccagatcttcttcccccggaccaattccatcttcttcccttctccatcctcatcctcaacccatcctctcacgaatctccctcaccttaacaatggtacgttgaacatcccaattgatgccagaccccgatattccctatttccttaactcccggagcatgctagcacctcaactcccaacttttccttcctccaggccgagtccggctatccgaaaacccgcgcgcgatccccaattcagtccggatgtctcattgagaaacatattcactaactcgtccccttcacagtctgtcctccgcaacatcaagtccctcgctcccctcctggaccgcgtcctggtccagcgcatcaagcccgaggccaagactgcctccggtatcttcctccccgaggctgccgtgaaggagcagaacgaggctcaggtcctcgccgttggccccggtctcctcgaccgtgacggcaagcgtctccccatgggtgtcagcgccggtgacaaggtcctcattccccaggtatgtggtgcaacaattccttcgaaatacacggaacattatatactaacgtgtctgtgctcagttcggtggtaacgccatcaaggtcggcgaggaggagtacaccctcttccgggatcacgagtatgtttcctctctctccctctcactcccttttttttgccgagaacaacaactgacaacctcatctagtatcctggccaagatcaaggagtaaattagtctccaagacgatatttttatacgatattttgtttcgccgccattcatcctccttctgtcatgtcgacaccaatccccgtttcgctgtaaaatcgcgacggggatattggaagacccctgacgtgtatcatactgacgcgacgtcacgagctcgacctctctcaacgatctcaagaacaccgaccaaggaaaaaaaaacaaaaaataatagcgaatagggatgctctcattggctgatatttgacattcggttgtttaggtatcatgtccgttgtgggctcctattttggcctgtctttctattttgcatgcatgagtttttgaagcgctggattggccttgggtcttgcatgtctttgtccactgtacttttaaattaaactgcgacttgccttctcccagtggttatgctggggtgggtagtcggtaattgcagacttgatcatctcctctccattggcatattctccaattcttcgttgccattagaatgcgtctttctaaatatcttgaaagtcaatcaacgtgcagtaaaggtgatattttgataggctaaatatgataattaatactgattctcagcacgcaacaattcgtaactgcatctccccccatcttgctaataatgaaagcccatgttcccgggcaactaatcaatgctgatctgagtaccgtacatatcctcgccggtctcattctcggtgctcgagtgcgccattgattcaatcacctccgacaccctgtacatcagctccgcgccgatagtagacccgtattccctaatcctccgcgagcgttccatatttataaacacatcgaaagccattgaatctgcgctggcattgacaattgtctcatgagagggaaaggaaggtggatattggctgaaatcacgaacgcgaatgttatccaaaatgaagcgcgccgcgaaaggattaatccccaggtcgcggagagcgacttcatagtcggactcctcgtctgtgatattttccatcatctcagcgggaaacaaatcgtatcgaagtctccccattccgaaacaccacaatacaatgtataacgagtggttcgggatcggtatcagtaacgttgtggatagttcctcgtagctgtcacaaaattcagcgagcgactggctttctcttctcagagaagcattcgcaactctgctgacgtctgccctgtcaggtttgcagatgaggataactagaagcatatatcgatgcatgaggcggaaaatcttttccctgaacggggaattaattcccgcgattccattgaaccttgtatcccttggtccatgccctggaagataccgctgggtcagttcatgcggggttgtcagaataagtccagtatcaggtgccagaaggatctctgcatcacactggtatcgggaatcagcgttctcatagtttctgtagatcaacttgggtggattagttggccacccctccatatctcgcacgactaacgggtgagtggttaggagggtggtagacaagaagaacctcgggggcgggtagaatgccgatctggtcacgatctcctgcatggcgaaggcagggctcggcgagcgagacagacccgagggtctatcattagggtctgggggactgtcacccatctgtgaagggtcgtttgagaactcgccttctccaattcttgtggaccctgacagggaaagggacgacggatcattcgacgaggtgatatatcctccatcactgcctctggttcgcataaataaggatagcgacccgaggtcaccagacactgctttgagtggtttcggtgtctttttagaatctacagaagaaataggaagtggaggcttgaaagggtcttgtctcaatcctgtggagggtgacttgtagcccaatttcatacgaaacagttccatctgagcgaggcaagactctctcttgtccatgtctgaggaaatatgtgttgccgtagtactgaggttttgctcgtaaggaggtttgaaggaaacattgttatcgtttgcattctgcgaatctcgggctagctgggtgatgatttgatcgtttgctggccgggttactgaggaactcgaacagccccttgacacgattttgccttcatgaagcgtactgagagaagcagccacgactccctcctgttcacaaggtattcctggatccgccacaggttccaaaaaagccttcgttcctttcttgcccttcaaagctctcggtacttgcgctttctggctgtcaaccctgccaacggagaatcctttttctttggtcagattgggagaaacatcagtgaaagtgggttgcgatttgttgcatgaactgacatcgacgaatggaggtgaggacgcggcgttctcaaaatcaaatgcactgaattcgctttcagtgggatgcttgtcttggttagctaggcccagcaataatcaccagtcaagtactcacctcagagttcggtacactcagaccgtgagcctcgctatcgaagtcaaaggggtcggcctcattatgagtgtaccgatcataagccccgctgtcgtagtcaatagagtcggtctcaatactgacaaactgaggcaccatccctgatgaacccattaaggggggaaatgcgtccccatcacgatgagaagtcgcactagtgatattcgggcatgcggcaggaacatggcgaggaatagtaaaaccatcagctatgtttgactgaggcaagcccgaattgtagtaattaaagatatcccgcgtgttcacaggaactacaggaacatcaggaccactaggaacaaccagacgaaccggggcagaagacgaagaagatgtagccggactctgagcgaaagcagcgtgaaactcggacgaagcgatcattctctcatcctcagttgtgaggagaataggctcgtctttgatgtcagaggtcatcacttgaggaaggatgccgcgccagatgtttcccttgacggaatcgagttggagacatccgctcagcagctctagatcctcaggcttagtttcgagcctctccattaagaggtcagtgcagaagcgttcatcgatttctttgaggcgttcctctggattttcgagctcgagaccctcaataatgggaacataaattggcagctcacatgtctcgtctgcgtaatcaattggacaaagcttagtgtagtcctctgcgacgttgtagaatctggcgtattcaagaagagttggctggttggaagtcattttgtcgcacagaaaggagaggagaggagaggggaggggagagggaggagtgagaggtggtgacgagagaggattgtttacgggagaaagggaactgaagagttgggggagttgccctggtgagggagttgggtggtgaactgggaaggtacgggagacaacacacagtcccaactaggtaggcacgagactgagaccaaaaaccaagatacttgtctgaacaggcacatgtaatgattcaaaagagaagaaagataatatttcgcttatttcgctgattgtaatatgtcgctaagtgctatgagagaaagaacatatttcgattaccatgaaccctctgcggtccgcctagtcgttgtagttcgactggcgagacccgtccttgttgactgccggcagtccagacaaagcattggattcatcctcctgagactttccagtctcttcaagcacaggtttctcggcgtggaccgcaacacgcacagcatggcggcggtggggcgtgaagccataagaagcactgtggttggtagacctgttatcccaaagcgcgacatcgtcctggccccatgagaagcgggcatgcatctcctgcgtcgtggcgatcacatcggtgaggaagcggatgatagcgtcgctttctgcggtagggataccgacaatcttcttcacaaagccaggattgaagaatagtgagttccagccggtgactgggttcgtccgaatgagtgggtgttcggtggtgacgggttcccgacgcactggccggcctagggctcgggaatcgttggcctgcatgtcggcggagtggagagctgtgaggcctttgagatagttttgcatgtgcgaggagagcaagtcgtaggcggcgtactgcgaggaccagagggtgtcgccaccgcctcctcggggtgggccagagagaagcttgagagatgtgtaggacggtggttggatttcataggtcacgtctgagtgccataggaaactgggtgtgaagagggcacggttgtcgggggcgttgtcgccagcgtaaacgacatggacgtcctcgagacctgccttgcgaggaacagatgtggtggcgtgctatgtcttgttagtatatccactcatgaatgagctcaaagtcagatatcttaccttgtgcagcttgccccagtattcacccagttggcgttgagcttcgatatcgaagttcttctgggagcgaaaaaagacaacgcctcggtatgcaatcagccgggcgaggtcatcgcgctgtgcatcatcgagctttgagagatcaacaccatggatttcagttccaaccttagggttgtaatcaaagacagctgtggcatccctcagaaggttgcggaacttggcgtctcctcgcagtcccttgtcctcgtagggagtgtattcaagcggggcccagtggagatccgggaatgacggcaaaagatcttcgtgtgcatagttgtcgtgtcgggtgactggagtctggccgggctgatagccgaatttgttgtcaccagcgtcccgcgcaaggacaggaacggtgaacttggccacagttggggccacagttactacgggctcttccagtgatggggccatctttaacgcaatagacgatgtatggtatgtgaaattaaacgcggaagatggaaatgcggaggttgaaatgcgaaagatgaatgcggagtgataatggaagattattgagattattgatatcaaagaatggaactaagttcgaatagagagggcgaactggcttatatagaacatccaatgccaagtgagtcaaccccagataacgccattctggaacgacgacggatcttgcatggccccggagttcacggagatggcgcaatttctcaaatgaatcacctcaggcaaatacatgatggagtgcctgggtacgagataattggttcgtgatggatattgtattgcgatgagacccgctctctctcctctaagatattcaaggtaatcacgcaattttgctgacgttgaaggcgaaattggccatcttcctcaaatcaacatgggaaactgctgctcggtcgatatgtatcagctctcaccgctgtttcagaggcgagctccaaccaagtcaatatcccctgaacgcgtgttcaaaggattgaggtgttgatgtcccgtgcaggagagtggatgttgagattaggaatggcgctaaggagacgatcacgcaagagtggcgggtttttgcgacggttactcatcagcctcactggccccatgcctagttggtacaacaacatgcagctattgttagtatgctatagttcttgaatgcattggattggctaaagaattcgactttaattattaagattcaagcccaggggtctagactgtgttgtattgtcttacgatatatggctacgtgtttccgaggtcgacaatgaggtctcagactaatgagagttcggacttgacagatcaactgtgtggatgtcatgtttcgcatgctgaagatcagctccataaaaatacagatcaaagtcgctaaattctcctatctatcccagatgaagccggccatcgccaagggactgctgtccaatcgacaaatcttggacttgctccgatacattgctcagacgagtggcaacacccatgatgccagcctcaacatctgcgagaacacccgagagttcactgagggtagaccggggtgtccctgtagatccctcacgcgacttggagctcacaaagtcgctgatttgacagttgagcgtagcttcaacaccatgaagatggtcctcgatctctttgaggttgccggtatatcttgtcagaacttctttcatctccttcgagcgatgagagaagtaatcgacctggttgacggggattccattgacgtccgtagacgcgtcaccctcaacgccgtcgggaagagcaagtgtgtttttgcgactcgaccgcatagatcgctccggaatctgttgatcctgcacagaccaccacccaccgccagtcgactggtattgtagagggagcttcagcgtatcgatggctcggaaggcaacttgggcctcggccgcatcccgtgtaacaaggctgcgcagcgcatcaatgtcacccgcatcgttctcaagcgcatgttgcatggtctccaatttgccttgtacaaattcaacgtcgttaggaattgtagccccctgcttttcgatggtcgggagcagatctccgacctcatggcacatcttcatctggttcaggatgtgcttgtcgatagcctcgatttggctacggatctcgtccgcgcagctctcaaattttgtggttggcaggagattgctaacgtcgactttcacgcccgggattactgtgctagtagcggtgctctgttgtagtggtgtagtctgtgcgggtgctggctggccgaagagagagagggtaggtttttgaggttgttgttgttgttgttgttgggctgtgttctggccgccaccgctgggatttattagaatatagccatgacacgagacgaggaaatggtcgggcacttacaacatgcctcctgtacctcctcctgttaatccaccaccaagcagaccacctccgagtccagcgaaggctggctttgcttgagtctgggccgtagacgcaccgccgccgaaaagagagccacctaaaccaccacccgttgttccttgagtcgtgccggtgccagcgccagcagttgatccaaacaaattgcttgccccagaaggctgtgtagtggtatttgcgcctccaaaaaggctactgccggccgcaccgctctgctgttgacctccaaacatgttggatccagtcggttgtgctggtgtggttcctgtggccgtgccgaacaagcctcctgctggtttaggtgctgtcgagctcgcagtgttcccgaagagactgctggtattagttgcgccaggagtagctgttgatgtggccgtgttgccgccactgttgatgggaggttgcggttagccttttttttttttctgtctgggactagggtgaccccagtctgcgagctgggaacaacgagggattgggagaggaaacgattcgaatcaaagcaaggggtcaggcgatagagataggtctgataggtgtaatcggagacaaagatgaatgggagcactaacaacaaagaactggtggagtttgtattgagggaaagtccacctgtggcaggcgtcgctgccttgggagcaaacataattgctaatatgacaataggtctcgaattctgaaatgagaatggaacctgtcaataggtccctcaataggaacagaccttggaagctgcgcaaatgcgatttgcggaatgcgcgaagcttctcggtactttgtttatccgacccgacctttcccagcttggaaaggctactggtttttatacttcgtttgtatggctttgttcgatacttggaaaatgcatagtaaaattggcatctcattctaaacgacattgatatgtcattcatgtgaccgccgtggacttttgatacaatcaatccatgggtgtctgacttgacctgtccattctcctttcgattctggtcttattcagagctttgccattgaatgagtcactgatcaaatgagctgcatctaaagccttcagcgaaggcagccgtccagtttaagtgacagtatttgtcattatggctgacgcgaatgccaaagagtggacgccagtatgcgtggcatcaacaagacgagaaagtgagagagagttatcagatccgtcacaactctcttcaaattcatcatcaacagtccaaatcgagccagtggcgacctctggtggtgtattcatcgatcaagataccgaattcggctatttcaagagtgcagaatggtcagactctagtaccgtgacccaggatcaacctttactgaacttgtggtgtataggacgccagacggaactactctgctgacagattcagcgaatcattctatcagaacatggatcttgtgagttggcgcatcatccctatattgattatctcactcacacagccaggccgccggatctactggaggacaagcccatgcaccagttatccccatactcaactctactctcagcggaaccgacttatgctaccgcaatctatcccttctacaaccttcaagatccatccactactctattcctctcatctgttcgtgatcatccaattcggctatcatcagccctagctcccatatcagtggcgagctactatctggtaaatccaatgacagaagcattcataactccgcactcaatgatctacccatccctgctgggtgggacccacttcctcacaggctcagatagtctcgtttgtctctttgacgtgtcccgaacgggagcacatggccctgtgacctcaatgccaaccatccccagcaaacgaaagcagattgtcggtggcggtattggcatgaagggcattgtttccgccctggctctaaaccccagtggggacggtatccttgctgcgggtactttcaccagacacgttggattgtacagctcaagtggctcgggtgagctccttgggactttcagcgtggcaaaaaccaacgcaaaccgtgatattgggggtcgtggagttacacagcttgtatggagtccctgtggcagatatctgtatgtcgccgagcgtaagagtgatggcattctggtttatgatgttcgagttacggggcaactgcttggacacttgcgcgggcgcaaggctcttacaaatcaacgcatgaaaattgatgttgttccatctggtcctgatggctctcatgagatttgggctggtggtaccgatgggtttataagggtttggaggagtccagagcactgtgcaggtgggaaggatcccgattgggagttcaaggtgcatgatggtaagtccattgacaatccccaagatgctcattgctaatgtatgacagatgccgtgacgagtacaatgtttcaccctatgggaagtgttgttgcaacctgctctgggcagcaacgtcttgtttcagatgattcctctggcgaatatattccagcggagaatcccgataacagcctcaaggtctggtcaatgccatttctgttgtcagaacccgacacaaaccatgacttagaccccgcggtttgaactgcaaaaagagaaccggtcttactcttacatctccttgctatatgcattccatcggaatccgtacagagaagcatatctagaaaccaaaaagccattaattgaatcactgcgtgaatgtaaattattttctagatagacgctctaccgcgtccatgtaacctgtattgactatgtaccaaatccatgcaatatgtactatgtactgtctcagaaacctcaggtccagtcttcagggaatccgaatgccatacttggcatatgggaagtcttccagggtggaatagagctggccaaacccatcaccaatcttcccaggggttccagaaccctgcaaacgccaggcctggagctcctccacctctttctcggcatctgacttctcatcctccttgtgcgatccggtggctccagcgagaacctcttcctcccggcccttgaactctcctaggagacccgggtgggggcaccaaacaacctgcatgccggcacgacgaccagcctcaacgcccggaaccgcatcctcaaacacgagacactcctccggtttgatctcagtcttccccttgctgcgcagctcactgttgatggtctccagcgcaagcaagtagatatcaggaagcggcttgcctcgacccttgccgatgcgcggatcatcaccaagaaccttgttatgttcagggaagagcgagaacagctctgtcagatgatcggtctttaatttgtagttgaatctgtgcgacgatgttgctagcgcgatgtacacgggctcatcggttgactgcgtcgacacaagattggacaacagagtcggcacaccggggagcggctttgcgcgtgggaagtagtgttcctgaagggctgttcgctcctcgttcagctgctgctcgccgatggggagctgggcaaagtctttgaagatcttgccggcctagatatttcgtaagtataccatacatcacgatatatagtgtgggacgaacctccggctggggtcgaccctgcatctgcgccttgattgaccagggaagcaggggtctgccgtacttttggagaattgcattcgtgactatagtgtataaatcctcggagtcaatcaacaagccgtccatgtcgaagagacatgctcggatgcggggaaggctgtcaaccaagtcaatggatgtataagtgcgaacatgattaattcactcacgcattagtggaagccatggttgtaatggtctgtttaatggtgtcagagtgggatgttgaccacgtttcgataagacgcggggaacaaacgttatcagtatcagtcccgtgattgagcccttggcaacgtctgatattctcgcccgacgacgacctgctcacaaaatgagcagttcttctaatgcgcccgaacgggacgggaaaggtgctcccgatgacgctgatgacagtggtgacgaggatgtcttccacgatgcccactttcccgccgaggaagaagccgtgagtcgtaacggtgttcaagcttatgatcggagccgcatattgacttcaatctttcttgcgatagcaactcctgaaagaagcccacgaaatcaaatccgaggcaaaccagctttttatcgcgacaagctatgaccaagccatctcctgctacgatcgagctctcgcttcctgcccgaactaccttgactacgatgtcgccataatccacagtaatattgctgcttgccatctgaaattggaagattggaaggctgcagtagactccgcaaccatctccattgaacgtctgagtaagattatcccgccgaccccaccggacgagggcaacgagtcgaaggggaaacaaatcccagaatccgaaaagaagcacacagatgcagtagttgaactatccggagatgacgaagaagccgagttgaaggaactacaacgattgcaagagcaggatgagcagcggggcaaggtgatgcgacttcgagccaaggttctcatgagacgtgccaaggcaaagacccaaatcggcggctggggtagtctgcaaggtgccgcagaggactaccaggcagtttctgcaattgagaacctttcagcagatgataaaaggtttgtccaacgggcattgagggaactccccgagcgcatcaatcaggcgcgggagaaggagatgggcgacatgatgggcaagctgaaagatgtgagtacttcttcctggataagatatgtcaaaataatagagcagtactgatctcgggcagcttggcaatggcatcttaagcccattcggtctgtcaacagacaacttcaagttcgtccaggacccgaagactggcggctataacatgaacttccaatcctgatcagctttagtcaatcagagacaatggcatcatctatttgttgtactccgggcacaggagagccctggaattaatttgtttctcggcatcatatgcataactggcaggaagccatgacggcgttctgacttttgcatatcatttatcttatttcaacaatgcatatcttgtaattaaaaaagctacagtcccatgattgtggagcacaggaacatatcatgcccagctatccaccatagtctcctttgaagccactggcttggatacgaacagttcttgccgtcatacacaaaatatgctggtctcaaaagggtctgtatttattgaccagccgggactgaattctttcaccgaaaatatgacaaatttcctctcgtttgtatacattcaggaatcatgagacatgcctagcaaggtctttgaaaatataatcatagaagtgtggttgtctttgacctcaggcgagactaaaaatatatcttgtcaagccgcatgatgaaactcccaactcatttagtcttaaaaccccagctttcgcacctgaatatactaaacaacacaacctcataaatcaccaaccatggctctcaaagtcttcaccactgaatccattggtgcgcagagaaaccacattgccatctacatcgaaaccgatccaagcgaagacagaggctggctgcaccatgtcaccggaacaatcctgaacggcatggattacacacccaggccaacccctaacccggaggtgctaccagaacatgtgccagactcaaagaaggagattggaactatcgaggaggctgatctagagaggttccgggaggaatgctgtctagcagttcctcccccgcgggcccaggtgacgctcaagggaacgcgactgtatcccgacaccccgctctaccgctgtggagattggctgaaagatgtcgaggagatggctttcaggaaggggatccttaagtccctgtgatgggttagttattttgtttcatggccttctgagaaagagtatgatactaagacaacgagcagtctgcggttccatacacgccatatcagagttaggactcctatgttggtatctagatagtattgaaacgaattattcttgtctgcagttttctgtcttgtgcgaccgttgttcaagacattatatagatggggaaaatagtggatagctataactatagggaagatcggaataatctgattctttgagctacacaacttgtctaggagatgtttcttgtcagaaaacagcttcattctcttacagttctcctttcagctgtctctaatcttgtagcagaattgttgctcccgagacctcgacgtatgtctcaaaacaatgccttctcgcatatagaccggttgcttatcttgccacttccgagcactctatcccatcatcttgtctgagaaccatcatctctcaggctataagctatatcagtccaaaaagtcccaccaatcatctccccggcatacaacttctactttgaaaaagtccatccaacaagatcaaagacatccacaactgtccaccatgccattcaacgtctatatcacccgacaagatggacgctgggattgggtattctatattgagcttgatgcaatccccaaggaagtgatagtggagagtactgggtggacacactccttcaagagcgacgggaaagacgggaatcaatacacagctcgactcaatcgcacccccagggtcaactctgcaggaaacatgatcgcaactatcgaggaagcagacttgccgaaattccatgaattatgctttacagcgattcgtccactgccgcagaaaaagcatatgaaccgtctggtccttcgctgcatgatgccagggcgatggaagcaagagccaagggagtggtggctgttgattcgggacagcgcttttgcaaaggggatattcaagcctcttgacattgagatatcagccagtcctaactgcctgtgaggacgctggggtgtggatagacaatctcttcggttggatatggactagaagtcatcaactagcgcatcttcgtcagtacctcacaattacaaatatttcatcccttggtaaactccattgtaaccctcgaccttctcactcatctggtggaacacaaactgcgccagacgcgcagcaggatacagccgcaaccctgtgggattgaggacctgcatcaatgccccgacagccccttcgtatccactgtccataacgccggcatgtatagtcactccggacctaaataatgagctgcgcacgaaaatctggcccatcacatccaaaggaacggagacagtctcgttgaattccacaaggtaggaaccctgcgcgagatctaaatatggatttgtattttccttcgaggagggaaagggtatctcttcagtcgaggccggctgtcggagtttgttatccaagtcgattaccccgggtgaggtccatttgagaacgcgcttcagtgtgaggtctacaccgcagggttgggcctgtagtgtgggatatttgacattgcgaatgatggagcgggtaatgatagagtgcccaggaaggatcatgtttaaagtgtcagagtctggtctcggttggtcctctgtgatctttgcctctgtactcggtacatgttggagaagtctgccaatgttctggaacagggacaagacaaacagagcaaacaacaaaccaagcaaacagtcttatagccgtcctacgatgtacagcatacggtacaacatacgtcaactggttatttcgcaggtacatacatatgtacctccaggcctaggtactatctgatattatcgaaccgaggaagccaaagggccgacagagaccttggaaaccccgtgagtttaaatctcgtccaatcagagcacaatgcggggacataacaccgggccgacccagcgcgtatggagccctcaatgccgagttcaacttccgaaggtatttgtatacttctatttaacctatttggacggagtttctatctctttggaatcaacttcggtgcaatttatacaaaatgccatcaatttaccgttccccatacccagatctggatatcaaatcagttgatttggtctcctatctgttctccaatcctttcaacacgcccttggaccggcctatatacatcaatgctgtctcaggagagcaatatactctcggagatgtgatgcaacgtacacgctctctgtccaacgggcttcggcaaagtataggggtaaagcccaacgacgtcgtggcattattcagtcccaacaccatcgactaccctgtggtatgccatgcaattgtaggctccagggctatcgttgccccgaccagtgcggctttgacagcactagagcttaacgctcagctcaagaccagcggggccaggttcatcatcgtccattcgtctttgttggagactgctcaaaccgcagccaaggggacatctgtcgagaagattgtcttgatagatgaccaaacacgggccaatggccaacctacatgcaatcatctcgctagtacatttgcgcccggtgattttctcgctatcgatccagccgaggcagatcgccaacccacattcatctgcttttcatctggaacatcaggcgcagccaagggtgtcattacaacacaccagaacatcacctcgaacctccagcaatggcgctaccaaatgctagactccggtcttcccgcccagcgaccagcaagacaatccgccattgcattcctaccattcagccatatctacggcttgaatctgttcatgtgccagtgtttgatatggggcacaacagtggtcatcatgcccaagttcgacctcgatctatacctcagttgcatccagaagtaccgaccagacgagttgacagtagtgccacccattgccctgctgttggtcaaagacccaagggtctccaactacgatctaagcagcgtgcgcaagatcatgtctgccgccgcaccgcttacaatcgaattatcgtccgccctcgaagccaagttcgcggagatttccaagacagaggtattctgcacccagtcatggggtctgacagagacctcgccaatggcgacagccgtcccgaatgaccgcatggataagcgaaacacgggcgtgggctgtattgtgccgaacatgcagctccgctttgtggatcccgagacgatgaaagacgcagccgtcacatctgacgggtccacggcacccgcggagatctggtgccggggtccgaacgtggtgatgggctactacaacaacgacgaagcgacgaaagaagcattccacgtggacgagaatgggacgaggtggttccgcacgggtgatatcggcactatcgatcgagatggctatgtcagtatccaggatcgcatcaaggagatgatcaagtacaaggggctgcaggtcatccctagcgagttggagggaaagctggtcgatcaccctgacgtggaggatgcggccgtgactggaatatgggtggatgacagggccactgagctaccggtcggctttgtggttttgagtcgccatgttaaagacatggatcgggagactgtccttgatgggatacacgcgtggttgaatgagcgcattgccaaccataagcgtctccgtggggggatctatgtcttgtcgcaaattcccaagtcgcccagtggaaagattctgcggagacagttgagggattggctgaagatccaagggcctaaagctcgtctgtgattgaatacttgggacaagcatctatgccaatggcgtggtaaccgtatagatcgaagtagtaattccaaccgttcaattagaaactccggcttatttctgcgtattccaaatattgtgtcacttgacagacatacatgctacgtagatacatctatcataattaaaatccaattccaagcaaattgaatgtccaaaatatccaaaacgctaaaacgtcaaacttcgggagatttccagtctcggggcccgcgggttccgatcggaggtcatttacggacttcgacttttgagactcagacccttgttttaacttgtcattctgtcagatggaattgatcacattaaattaagctcattgcacattccacatagcttctcacattctttccttaccttggtttcggacaagggctagtcctttttcacctgcgaggtcggtacccgcattgtgattcctactctcaattacacatatacttgtcatggggttcttgacgtggcccttctcacatgagaaggaggaaaagagacccaagttcgtcgagctaaggtcgtcaaaatggtttattatgttcgtcgtggcctttgctaccgggacggacatcttcatgtacggtcttatcgtaccggtcacgccaacagcattgaaagacaaagtgggaatctcagaggatgatgtccaaagctggacatccattctccttgccctgtactcggctgctttgttagcctttgcccctgttgtcgggtacattgctgaccgagccgagtcccgtcgatggcctttgctgtttggtctcgttgcgttggccgctgcaacagccttactgtgtgtcggtaccaatatcgcgttgtggattgttggtcgcttgtttcaaggcgctgccgctgcggtggtatggacggccggcctggcactgatagtagacactatcggaaaagacgaccttggccaagccattggctatgtctccatggctatcagcatcggaacgctagctggacctcttctcggtggcgttgtctacgagaatggtggttattatgccgttttcggtcttgctttcggtttcatcgccctcgatatcatcttacgattgctgttgatcgagaaaagacatgctattaaatggcttgcgccggagatgacaccgctgtccgtgacggagaagaagtcaggggaagttttagaacatcccgtcttgccaaccaatggctctgaatcccgtgaatcacaaccgccttctcccccctcacggagcgcgttcggacgtgtcgctattttgttgagctcaccccgtctcgtcgtatccgtctggggatactttatcttgtcaatcgtcctgacctcattcgacagtgtccttccactcttcgtgcaagagacattcaagtggcagcaaagtggccagggactaatcttcatctcgctcatggtgccgcacgtcttagacccactgatggggtttgttattgacaagtaccccaaatcctgtcgctacctcgctgcaggcgcatttctcaccgtcgttcccgttctggtgcttctgcgttttgtcaaggacaactcgatgcagcacaagattctattgtgtgccctcctcgcttgtgttggggtatgctttgcggtggctatgccacctctcattgtggaggtgttcttcgctgtgaaggagaaggaagataaaactcctgatatcttcggtcgcggtggcgctatggctctggcttttgggctgtcgaatatggggttcgcgaccgggagtctgatcggcccattctttgcgggttatattcgccaggaagctggctggggtgcgatgggttgggcattggggttgatagtgggcgtatcatctctcccaatcctgttgttcgtgggtggctggatcttgaaaaagccgctcgagtcagacactgaaggccagttgatggacagcgcccctgtcccataagttggcacagccaaacaaatatatttaccctgtatatatacttaatagaagactccggcagtcgttatccgcctatcaccatcatagaccttccccagtcaaacgtatcgtatctcttgagtaaccagaaagacaggtagtttagaattgagcgagtacagcatatccgagggaagagcgccaatgtaatggagggttgcacaacaactataaactgtagccaacgtgcatctagaaatatatatcatgattgtactaggctacactatcattagactcacgtataggaaacgacgaagaattgtaggcctctcacatgggtttatgcaatatctcaggtacaatatgacatacagattagagtacctgtaccatgacgttgcttctcgtaagttgattaaacttccatcccccaactggctgcgattcacattgaccatttgtatgcaatcatcttccaaagttacggagattcctacatactctagtgtaatttcagcttcttggtgtttaaattattaccactaaatcaaaaggtgattactatagcggtgatatacttccacgtctatataaggttctgaggtacgggattatgcggctctgtttccagggttcacctgagcatatgacttccacgtacaacaagaaaacatacacactataaccagagccgtctcagagccgataatggatattgtcttcgagggctttgactatttgttcgtattcctcacaaggttcgaaccccttcaatgtgatcggtggtcggcgtttcggcgtccgtccaggtgagttcggggagcgagggaccccgacaccgactgattcaatttatgtatggtgttaaaattgtctggagacgagggaatcataggtttgtcgtgtcaaatagagtttgatctgcgaagtctgagcatcttgttgacatggaaattagaggtactagcgactgagctaggatataagactcggcgagcgtctgtacatcgtgtgttgtactgactacattcaccccttcgattgttccattctttacattctacatcgaagcaaggggatatatcaagcataaagttcgtgctgcaaccctttgccctacaaccaattgtaccaaacccctagaaaatgggaggaccctatatgcctcgaacggcctccatgggaggtcgaccaacaattcccctcgatgtcccaatatgcgccgtcttcctcgctcttttcatcatcggcgccgcctgccatatgaccctgttccgtcgcaacctcgcaagggaccacaaattcattccatcgggcgcaacattcggtttctgcatgtcgcgtattatcgcaaacatccttcgcatcgcctgggcctgtcacccgacgaacattagacttgcgattgcagcacagatcttcgttgctgccggcgtgttgctgcttttcatcttgaacttgctatacgcacagcgtatgttccgagccgtctacccagtcctcggatggtcccgaccagtatcttgggcgttcaaagcactgtatgctctcgtcgtagtaacgatcatcatggtcatcacttgtgttattcagagttcgtatactctcaactcgaacacccttcgtatcgatcgtgatatccagctctatggccagacatacttcgccatcatctcgttcctaccgcttccgcttgtcgcacttgtccttctgtctccgaatagaaagtatattgaacaggttggctatggtagctggatcgccaaagtcttcatcgtcggacttgtcggctcattgctctgccttggagcatcatttcgtgccgggacctcttggatgccacctcgtcctgtcacggacccagcctggtatcacagtagggcctgcttctatatctttaacttcactattgatattctagtcgtggccattttcttcgtcgttcgtgttgaccggcgattctgggttccaaatgggagctcggaagtgcgtcactacagacgtggtgagaataacgcgcaagtcgcacaagaggggactgctcttacggttcacgacaaacaggatatcgagacgcagagtaggtagcagcatatctcagggcctgacatgtgacatttgtgattaaggaaggtgcgatggagggtgtcgcactttaggaaggcaccgtttgtttggggtataaaagggcccctccccccatttctcttcttctcttcttcttctctcctccacatctctctagccaccatctcaccgtagcccccacgagacagcgtcggcagaggatgccgtagcacatgctgcttcatctaccacagggaccatgacattaccatatgcacgaggtccatgtaggtctgcatcaaacatcaaactgggctttctcgtggacgttcctgaagtcgtggctctcattaccacttgacgagtcccacggaatacattaggggtgtaaatcttcgtagccgagactcgaaggtagtcacggcaatgaccgacgcttccaaccttacggtttcttttttgtgtatctaacagaccgacgatgaaggttgtaccattctccattgtttccccatgccactaccccagttgcactacccgtcgtcgcgccgtcgctcagctcggcgttactgttcttcccaacaccgacgtcgcccagtctacgaattagatagactgtgacgccgaatagacagaatagcctattgtttacatgtattatctgatcaatgcttaatcgtcaggatgactgaccatgatgcatactgtcatgtgttcgtgagctgaaagagcagctttcggtgttgacatggcactcattcaaggcgcggaagatgcacacattcttctccagctattggccttagatcgtcagaactttgaactttccctcattatcctatatgactagtgctttgttaccttacccaagaaggtctacacacggccgtttgaggtcgccatggtttcaatgcgtttctgatactcgatgttctcggatgccactttttgttcatggcagaagaagctgggcccaagcagataacaagcaatgatgacaagccttgcactggcacagataaaacgtaatctccatgcagcttctaacacttgtaagtcatctactgccatccagagaggaatattgaattccagccttctatgcgtatctgagctcctaatctgttaccacctgggcagagaaaggtatttaataatctggaatagcctcccaaggttatttctatagtcttatgggcctgggtcttacaaatggtcttttattttcatgattggtatcaacaagtggccaggcatcaaaccatacagaattaaataggcgagagccatgttcgattgcaacctccattctccgccagtccaattgcctctcgcaggacaaagatgaagtctatcaaaggaaatagtcaggtgtgcgcctcgataccataggttctcccgctcgggggcaggggtcgaattgtaggctagataatgtcagtgggatatccaaatgagaaattgcaggagtgcgcacaatgtgtatttcaaatgctcgtcaatctccataatggcggcctggttgccgcagcggtaacagtaatttggtgctgtggtctggttagtgcttttggtccatcaagtcttgcgaataagaatatacctgagaaaatagtgacgacgttccgatcctgtgaccagttatatccttccatcaccaattgatgggcacgtgccacaagagtcaagccattgttgtggttgaatgcctcggaaatgtcctgtccgaatgtgtatccagcaccacggggagagattccccatccgcatcggtcatcaggatcactccagagcaaatcacacatgggaccctcgtggggaacttcttggatgcgatcaagcgaccggatgttgtcgagagtgtcaatggatggactcagtccaccgtgaagacagaaaatctggttttcgatgagagcagtaaggggaaggtagtcgaaaaggtcggtgaagtatttccacacgttggcattgccgtatttgcggagacattcgtcatagaatccgtagacctgtgtgatctgtcgggactcgtggtttccacgaagaatcgtaatacgctgcgggtaacggatcttcagggagaccaggagggtcactgtctcaactgagtagtaaccacggtcgacgtagtcacctatatcaagaaagattaaaaaacattaccccacaacgcgttgacccgaccgttatccactcacccatgaagaggtagtttgtatccggattaggaccgccaatgcggaaaagctccattaagtcatggaactgtccgtgtatgtcaccgcagactgtcactgggcatttctattcggatatatgtcagtgggctgggcgatcaggacaacctcccgaccgagaacaacataccactggctgcacattggattcctcctgcaatacctctcttgcctggacgacacatatgatcaacttgaattcatcattaccactctgtcaaaacaagggacccacccgatcgcacagccgccgcacgtcttcttctgctaattgcttgcaagtcatcaaactctcgatccagccgtccaaagtcggtatggacccagggtcgcttgttggcgacaagtggtgtggctcgggggaccgcgcagtatcgatttccatgttgttatccattgcgtcggtgtgctcaactggttgaaaaggaggggccagctggggaggggcggtctcgtgagaaaacaacgggattcgtgggtaggcgcaggtatcgtggggtctggaaaagatgtgggataattacgctccagatggaaattcaattaaaaggcaaattcccagtattgattcaagggataaggggatgggacttgggaacacgagaaagggagaagagatgagagttcgggaaggtcaagttgagtggtgaacagatgcgccacacttcagccacacaccgctttctccagcctacgtaattatcaactacaccgttgtacagaacgactagggggtttatatctttgttgatttgtgttagacatttaagaagacaatccaatgggtgtataagaagatgtcccacacaatccactcagaagctacggaggaaagacgtcgagtgggccatggagacatggctgtagcttcgtgttattcttgttaatgttgagatggatatatgccatttcggaacaaaggatcttctactttgttaaagtcatcactcactcgtcactttttagataatgtcaccaccaaatccaccaccaaacccaccaaacccaccaaatccacccccgcctcgtccattactaccgaacggtcctcgattacgaccaacaggtggttcaccaggtcctacgggatcatatcttgcacctggaggtacacgggggtcatatccatcattaccagctcctcccccgttgaagagagggtcatcaaaggtaggatgcatacccccgccacctggaccaaagccagggcccataggtccgcgcaaaggatcattaggaccaagtcctggtgggtagagatctcgttctccaatgttgtacgggcttctgccttcaagtcgtcctggatatcctcgtagaggcctattgatctcaagctcatcttcgaacccgggtggagcaaagtctggtgggttggagcggcgaggagctgccgccaagggatcatcaaatgggcgtgggcgagcaggctgtggcagggagccatctcgaagaatatccggttgtctttcttcttgtggtcttgctctggataactggcttggatcttcatacccctctttgtacaaaccgggcgcgagtttctggatgacgttgatcttgaataaaccgaccaggtcgcctagtcgagctggggagatgaaaacatctcgcagagacgcagtgagattgtctgaggaggatatagggagcgcagaggtggagatgtagtctttgatggggatgtcgaacgagctggtccggtcatcgcccaatgccaatgcgaagatcactgcgttatttcccagccgactcactttgagtaaatactgcattgaagactgcgcatgtgcgtaccgaaaggcaaatgtatcgttagtgttccattctgcggggagggaaggtgtatctgtagatgtttctagagaagttaataggagatcaccgatgcgatcggagacagacttgacatacctaaagtgtgctcttcaccaagaccgatcaatctgaaatcaactgctaccatgcatgcatggccgatcagagccacggcctcatatgatgttttgagactcggctgtctatcccccgcggactggatagctctcacggcaagatcgaggatattatcctgacgaagggcatcggctggagccatgtttgatagatattgtatattttagacgtccaatactagatggcaaagaacctggaataatgtaggagatggggcggctcgtgaatgcccaaagtgacctcacatggggctagctgccttgggggagctgtggcgtcggaacaaacatcccccgctccagctatcttccccgcttgcctgttctatttgtggccaagcggagagctgcatacgaaacatacaaccactgttattctctgaaggtaatgatttgattgatatttcccctctataacatcgacttcgggaaattcttcattgcctgccgcactcccaaatccgccaaaatctcctcagttccacccaagatggcatcaaacttgtatgtgcgatggaacatctcaatgaccttgcccattcctgactgagtgataccacgaccaccaaagatgtttgtagcgagactggcaatttcgcctgcggcttgggtacagtgtgatttgagcagtccgataggtccacccagattctttgcttgttcggcgtatgtcatgttgcacatttgataggcgatggattcaagccatgcctggttagattcggctagggagatcatgcgggcgagcctgtcgggagttagaagagggatattaagagcagattgtaagaaactcacttctgacgaataactggctgttcaatcaacttcttaccaaagacgatgcgttgattggaccatttcattgtttcttcgacaaccaccattgacatgcggaccacggcagctaccatcataaagcgctcgtggttgaagttgctcatgataacgaggaaacctttgtgctcctcacccaggaggttctgaaccggaaccttgacattctcatattgcacgaaagcagtaccagcggcagtcgaatatgaggtcttgatttgctttgtctccacaccttcgccgcgaggaatcaagagcacggagaatcccttctcggtacggcaggcagtgacaaagtagtcggcgaacataccgtttgtaatccatttcctagacattgtcagcgcaaatccaattaaacaacaaacgtgatccgactgactttgttccgttgacaatataatgtttcccatcaggagtcttctctgcagtcgtcttcagacccgccacgtcgctaccagcaaaggcctccgtgacagccaaacacatctttttctggccggacaagacctcgccattgatgcgctccttgagtacaggatcgtgcagccattgctggacagctgtcaaactaatagccatgcctgccatatttccatcctggaagcctctcgcattggcacggaccaactcctgtgttacaatcatatcgtggagataatcaaactcctttccatccacaactccaccgagcaaggtgcggccatgcagatgctttccagggcccagtcgcatagccagaaggttcgtctcggccatgcgattgatgagctcctggctgatgtaggtgccatcccgctccttctcttgcgcttctggcgttacatatttatctgtgaactcccggacggccttttgcaagcgtcggtggctttccttgtagtatggggacttgaactggggtcgcagccacaggggttctgcgtagggcacggggctcaaacctccagggacgggcacgatgacctcgggcttttcgccttcgatgacaccaatgcaaagctggtcacggtatttctccagcacctcctggcggtgcagattgtagaaatcggatgttgcgtcctggccagcaatctgagcaagtacaacagcaccaccgggatgggcgtcgacaaaatcggttagatcatagacttggtggtcgatgatacaccagagggaatcctcggtgttgtgcttcgcgacttccgcgcgcgtcagggtttctgatgacatgttttagtctggggatctggagaaaggggagaagaatggggggcaccagtagtaaatacccccagattatgagtcgccaatcatgcaactgcagtttcaatttgagccgaggcccgaaaatataatgtggaacctttggctgcaacctcaacaccgaccaacgaggacctcggaacaggactggcccaccatacaacgtataattgatgttttggccaatagcgggctgttaaattataatcgccaagagtgtctatatcgttttacgacccacccgtgatcggcacgtgtcagtttgagcttcaactagctctagagagaaggggcagtacagcatgagatttatattgtttcggatatggggttcaaaagagtagacttctttctatgtacttatgtagaggctatggtgacattggtctttgtttctaagatctatctcaaatcgacagtagtgtattcatgggcacatcttgacaaatggtatctttaaacgccgtcaatgatcccccttcgaacgattattcttgagatctttcatcgcctgctccattaaccacgcgcaaacaggctgcgcatcgcttccgacccgccaactgcctagcacaacgtcgtgctgttcaagcacttcgcttgcgcgagcccaacgacgtcgccaaagctcctcgcgcttatttggcaggggcgcaggcggcacacccgttccattcggccctggtctccctgattggttggatggagactttgcggatcctgagaagttgagtcggtcgcttgcatattggaacccttggtatgcagcctgggcggctgccgctgggtatgattgaatgccagtcgcaggagccgcaggacgagccggcgtacttagtgctgttgatgcaattgatggggttgatggggttgatgcacccggatctaaactggttgttgaagacccggtgttcgtgcgacgcggaggaggcggtggtggcttgacgcgtgcaggttgcgattgactctgggtacctacagaattatcatcaaggcttttgagtccggaagaaggaagttcattcgttgatgtcccagcgctactctcagagtttgaaggcgagggatccaggtcaatcaatgagcctgtctttggcactgcacgtctgggtggcgtagggggaactggtctgcgcttgggaacctcttgtgctggtgtcgacatcgtgtcattttctggcacatcggaaggtgtagcgacgttgcgcagagaggatggtctggaacccttcgccaaatcagctggtgtagaaaccatgcgcaatgcagacggtttgatcggtttcgctgggcgtggccgtgaagtggcggggcgggtaagnnnnnnnnnnnnnnnnnnnnnnnnnnnnnnnnnnnnnnnnnnnnnnnnnnnnnnnnnnnnnnnnnnnnnnnnnnnnnnnnnnnnnnnnnnnnnnnnnnnnnnnnnnnnnnnnnnnnnnnnnnnnnnnnnnnnnnnnnnnnnnnnnnnnnnnnnnnnnnnnnnnnnnnnnnnnnnnngggggggggggggggggggggggcgggcccccgccccggcggtggttgatcgtctatgatgagatctgtgagatcaatcaggtcctcaaggtcaagatcttttggatctgtatcatgatgggctacgggcactgcagggtcagccgtgccacctcgaggcgggagcgctggtctgttggaagcggcatccgagtggtccactacaggtggtgaactgcgactgcgcttagacgggtcaagatgggggacggatttgtcgaagaacttctgcgtttctggagtcgtaacatcacgaatgaagacacccaggatctggccaggatatgccaagacaatctccgtgtaaacctccagatcagcttcaccactgtcaccaacaagaatgaattttcgttctgggaagtcgcgcagaatttgttccaatgatccccgtttcctctccgctgtgggctcaaagattccttgaagcatacccgaatactgtttgagatggaaggagcccggaggcaatccgaccatcttgaagtaccgctccaggaggggatacaattgccagggagcattcgacacatagtgaatttgcacgccctcactggccagtttgcaataccagtcgctaactccgtcgattttaagttcattcaattcacggacgaaggtgttgcggaacatctctttcgctccactggaaatggccgagtgcttaacggtatcatcaatgtcactgatcaaactgattccaaccggatcaatgacatcaatcggtcttgcgacagacaggtcctcagatgccaacacacgaatatgagttggcgcaaagggcagtgtagcgcgaagagtaaaatggcctgattcatccgtcatgatatttcgagacttgctttcggtgtcgttgaagaagaacactgtcaccggcatgctcccaacgggattcgacaagaatggacgaagtctttccattagatgggcatttgctatagataattcatccttactcaatggtgcagtgggtcggcgtgtttgttccacattcgagcctttccaagccgggtctgcttctctctcggccttggcgactagcgattgaatctccttgtcgatgtattcgtcatctcccttcccagaaatcttgtcgttactttcattatttgcagttccagacggtgcagagatcccgctcagcttcctagccagggcaatcattaatcggtgctttcggctcatctgccctcgactaggagagtaaatccagccacgcacgtcaacggccacaactgcctcttcattctccgttggatcccaagtaggcgaggagagatcgtcgtcctcgtgggttgcaccccggtaatcatcgatagtttctgaccacgactcacgtcgcggacgtgtgttggtaccggtgctcgtgctcttcttcttctctggcaatcgcctagcataactggggaataccaccatctcctcatcgcctgaccgtgaaatctgtacgtccgggaatgcaccgggtgtatcgtagtagtcctcatcgtattcactcctctgcccggaccattgtgcggtataggtctggcgtagctcatttgccgctttgagatatccgtagaccttcttccgacggctaccgggggcaccagcaccatcaccaccccctggcgcccatgttgatgaaagtccagactgcgacatcgggtctatcgttgtgtccttcggtccgtagcggggttctcggatcgacttcgggtatcttgcagctaggctgctactagctactgtagtaggtttcgatagccttgactgtcgttgggtcccgagaagataattcacaagacgtgcgccaaatttgctatcgcgtgtggcgagtcgcgcttgtcgctgaaggatcgctcggtagattcgcgattgggcccggtgtcggagcgcgggcagggtttcgtaccggatgccccagagacgggattgagtgcgtctggttgcgcgtgcaccaattatcagatcaagtatatgcgaaagtctgctgggtctaggttcgcgggggaaggaacgaaagaggctggtaggtggacgtctaaagagagagggcctcgaccgcaagattggccaacggaaacgtgatttaggcgccagggtcccgggtggtatgatgtacaagcagggtaaagtattccgcgacacaaaaagccaagtcgagtaaggctgtagaaagttgattacctgcggggaagagatcggccatgacgatgactactcgggtgcgctcaccgcgttgcaaccgaagattccagtttgatatttgagactcttgttcttttgtgttgaaataactacatttagacataatcatctaatatttaagattctatccatacatccacaggtatttgaaaggaagcagatacgggaattttgcattgatgaaatgtatcctgatttataatctagccatgaaacctctcgctgtttcagatatagtgagaaaaatcgtatattgtacactaatatatgagaactacctaggtatcaagtgccagttatgcactgtcctcggcgtagttcaccttctttgcacgtgaacttcgagaaggtatcgaacgagcactgtccagttccaccgaaacctccccagtttcttcggactctggggtagactcagtcaacgaagctctgcgtttgcgagacctgctcggccgaggtgtgcgtttcgtctccctgaccggttttttgactggcgtttctatcttgacgggtatatctaggggagcatcgtctgtgacagactcattcttaccctttttggcggcgctttttttaggacttggtgcagccttaggcttcacgattttcttcgccggtcggagccattcttccatgccctcaggccaatagaccctgccatccggcccacccatcccgacttcttcgtctgggatggcgcgaggcggtggtattgagccttgtaggtccacgaatgccccgttcttcttggaatttttgggtggtttgaatggttggttttcgtcaaggcgtatgaagggtattatttcgttcacaagatcgtagccggggagtttgaagtttctcatcaactcaaatacggcttgttctttgtccttggcctcaatcatcaggtccatggtaggcgcacaaggaggtaaagtagtaacgcgggcactgtgtttgcgtcgttggcgccgagtgatggcgggtgaagtttgttcggaatagtgcatcttttgagtgatattcttccgagaccatgttgctgatatacgctcatagaggggtatgatatcctcggttccctctcggagctcattggcgtcaaaaatgatattatggtggtggtagtcgaggacaagagggatattgagctcctcgcaaataggcagtagatcgtgaacggaccagctcacgtcgtcattctccagaactaatcgattcttgatgtcttgcgacaacatagcgtagttctctcggaaccgatccagtgtagcagccttatcaccaaacactccacccatatgaaggatcatgactgcatcgcggtcctgctgtggaggaagtttgagtagccggagcatttccgagtgatactcgagatcgcgaacggaattctcgatgacttcttttctcggtgatccaaattgagtaaattggccagggtgaaccgaaacccggtgtccaagttctccaaccacacgtcctacttctgccagcacctccgaggcgaatggcgccagcttataaccatattccttatgactggcaaatgggaacatctcactgctgagtcgcatgaacttaatgccatacttgtcgttccaacggatgattttgaccaaatcgcgtgcattcgccaggcctagcccctcaacgaaagcttgtccgcgtgcaacatcggctggctgatcgcgatctgggcgatttttggtcgggtgtgtgggctggtcgggatcttggagcgggtgtcgattttcgattatagaggcgattcgacatgttcgagaacagaatacggacggtgttgaatagcgaaggtacgtatttagacaagcctgtgcaagtcagaacccataatcgtcagcgcgagtgtatcgtgcccagcacagcaaaactcacatatcctaatcgacctttccatggcaggggaaggtagctgctgttcaccggaggtggtcggccgagtgcctcttttagctcttccgcatcaacggggacatcttcgtctgattctgggtccaatgaagcctctacctgaccagcaggtaatggtatatctccattgaggatatccgcaggcttcatctccggcccaggcgtctcagttgccccgaccatatcttctggatccagatagcttggttgtcggccaagatcctgtgaatacgcacgcgatgatgcgagcctcgacgtgtttaagggatgcgcaacacttttaaatgagaaatacgagaagcgcagggcacagtgggctgcatgatgggcattatgaattggggcgagcgatctggttctcgccacaggaacagggattctcaatgacgtatgtcgaccctgttggctagcttccaagggatgaacacggatagacagaccctgcagcagccgaggaaaagaccgacacattcagcggacttttggaagtagctcaaggagtgttggggtttgaaggaggtcgtaagggcgggatgttccatgacgcgccaatccacgcgactcaccgcaccaattcacccaacctcatcaaccttgaaaccacaatttgacatgatcatatctgcaatttcgaggcctggaaattgtctgcaatctacgtgataatatacaatagtgcatgaacccattgatgcctcaggcctcatacgtcagcgcacctgtcaggcaaaagtacccgacgcacgaaccgcctcaactgcagaaagcgggacaactagccgaagaaacaatgcctagtggctgcacatgtgctctgctactatttatattggacacatcacaatgccattgtctgtgaaaccttgattgtataacagtccgttagcctgcaggggctatgtttgcagtacgttgtacagcaggcgcaaggattgctgcttttgatatatttccgccatactatatctacaatgtccttggtaaggagcccttccatacccgattgatttgtaggatgtcggcatctgttaactcggaccacccattaggatcctttcggtgctactaaatttaaagatacagatcatttcctcaaaaggatacacagacatggctgggccgtgttctgaaaattggcgtaggtctacatgtgggaaatattattcaactgatgtaggagagcagaggctagagacgaataggctcagacccttcgagcaaattagcctcagacaatgcgcggctcgaaccgaagttgatttcattcccaagcccaaagatgagaatgaagacaatttatgtcacggcatatgcttatcagccaacgtctatgggtacatacgtatgtaggatgatatgtacgtactttatgccggatgatcaaggtatgtgcatagacaatgaagttctatgttgggtttgccgcataactgttccggtgctagatccaatgagaccttatgggtaccaatcagcgtgaactctatgacaatagtctgcatatgtgggtatactaaatgagtacgggggagctgataggggaattctccgggatataacaacgcagcaagttgcacggtggtatgattggagctagggccaagacgaggtggggttaagatgggtactgacagttatttcgaacttttgtacggactaactcgtattaacctttagttataatcgcctgttgttcgcaatcatgttctttccttaatcttccgaggccaaagctcttttttacctcacagaagaactattgccgcaatgattctcaaggttgttgaaccgaaaccggttcccccagagccaatcgctatatgtggaatgtctgtacgtctccctggaggcctacacacaccccaacagctatgggacttcctggttgccaaaggagatgcccgtggccaagtgccgaagtccagatataatgtctccacatactactccgagacccagaaaccgggcagcgtcaagaccgagtatggatacttcctggatgaaagcattgacattgcttctgtggatacatccttcttcacaatgggcaagttggaggtggagcgcatggatccacagcaacggcagatgctggaagttgccagggagtgtatggaagatgccggcgaaaccaactggaaaggacgaccgattgggtgctacatgggtagctttggtgaagactggcttgaaatctgtgtcaaagaaacccaacaatacggccagcatcgagtgagcggatatggagacttcatgctgcctaaccgagtctcatatgagatggacctgacggggccgaggttagttgttccatatttttttttatcttggaatagaatgcaattgctaagtggaaaaaaataataaagcatggtcgtacgtactggctgctcagcaggtattgttgcactgcatgaagcatgtctggcaatttccaggggcgattgcgagagcgctatagttggcggtgcgaatttgataatggcaccaggcatgacagctgccatgagtgagcaaggcgtaatttcaccggatgggtcttgcaagagcttctctgccgatgccaatggttatgcgcgaggagagggaatctctgctatcttcatcaagcccctggctgatgccctccgggatggaaatccagttcgagcggttatccgttcgacatcatccaacagtgacggaaggggtgctggaatcggcgcacatgttcccaacgatgtttcgcacgaggccatgatcaggcgtgcatatgaggtggcaggtattacagattactcccagaccgcatttttcgagtgtcatggtactggcacccaagttggagatcccatcgaaacccgagcagtgggtcgggtttttggtccttctggtggtatcctcattgggtctgtcaaacccaatcttggtcacgctgaaggagcttcgggaattacatccctgatcaagtcggtactagccctggaaaatcggaccattcctccaaatatcaagtttaaggagcgcaaccccaacatccagtgggatgaatatgggctcgctgttcccacagacccgatgccatggcctgaggccaggagcgagcgaattagtgtgaactcttttggaattggaggtaccaacgctcacgttattgtcgattcagctcggagctttggtgtctcccccgttgccacacggcataccatttcgccccagctgcttgtttattccgcaaacaatgccgagtcactaaaacaaatgatttcccactacacatcctatgttcagaagaacccagccagagttgccgatctggcgttcactctagctaataaaagggagcatctgcctcatcgggcattctctgtgcaaagcccattgggtccgctcacgacttcggcaccctcgaaaactggggagacaccaaatatcgtcatggttttcacgggccagggcgctcagtggccacaaatgggtgcctctatgatccacaacgacgtctatcccgcatttaagaagagcattcaaaatcttgactcacatttgcaaaccctcacagatgctccagactggagcattgaagaagagctcttgaaggaccccgataccagcagactcagctcgtctgaattatcccagcctctctgtacagcaatccaggtggctctgatcgatacttttgcttccgttggagttcaacctgctgctgtcgtgggtcattccagcggcgaaatagctgctgcatacgctgccggtgctatcacagccaccgaagcaatcacgattgcattctatcgaggtcaggtcaccaaggcgcaaaccaggcctgggtccatggcagctataggcatgggagctgaggacatccaggaatatctacaggacggtgtcgttgttgcttgcgaaaactcacctaagagtgttaccctcgctggtgatacacatgctattgaaaaggtagttgccatcattaaggaggcccatcctgatgtcctggctagacagttgaaagtcgacaaggcgtaccactctcatcatatggctgagataggtgacgagtaccatgctttgattgaacatgaaatatccaccaaggctccaaataagttattcttcagcagtgtcgagaacgaactactcacggaagcccaacatctcggccctaaatactggcagatgaaccttcagtctccggtcctcttccgctcggctgtatcgtctataattaagcaccagatttcgaagaatatggtgctgcttgaagttggaccgcactccgctcttgcgggccccttgcgacagatccagagtcatctttccacttcttctccttatatttctacgtttgttcgcaaccaggatagtacggaatctttcctgactgccattggccaactgcatgttctcaatgctgtcccagcgttggataaggtcatcagcacgggctctactctcccagatcttccaagatacccatgggatcactcaaagaaattctggtatgagtctcggttgagcaaggagtggaggcatcgcgagcacaaatatcacgatcttttgggtgtccgggtaacagagagtcctgacttccatcctctgttccgaaatctctttcacttggacaacgccccgtggattcgcgaccacaaggttggtgatgatattgtattccccttcgctggctatgctgcgatgattggcgaggctgtgagacaggttaccggagttcgcgaggcattcaaactgcgcaacgtcattgtcagcactgcccttgtcttgaatgagggcccaccagttgagatcatgacaacattacatcgccatagattgactgattccctggacagtgagtggtgggaatttgccatcacttctcacaacggagcgaattggatcaagcattgctcaggcgaggtcagatcgcttaacgaataccttgaagatgtagacaagaaagcccctcttgtgcgcaaggttgaaacacgccgttgctatcattctatggccatgtctggtctgaattttgggccatcatttcaacgtcttgaccatgtccgctcagacactgtttcgcagagcgcgacgtctgaacttgttgcgaaagatactgatggggataactatcatttgcaccccacagtcatcgatgcctcacttcagctgctcagtgtcgctgcttccaaaggatatgccgaaccgataaccaacataatggttcctactcacattcaagagatctccatctaccgctgttatgagaatgtccacgtccaagcttccgcatcttacaccccgaacggctctatcattgggagtggccagtgtattactgcaggggggaaagttgctttacgcagttctggaattaaactctctgttctcgatcatcaggaccctgaaaagggggaaccccccattggctgtgcagaatgggctccccatatcgacttcctggatgtcaacactctcatcaagccattgattgaccgcagtgattacatgcccgctttgacagagctatctcatctgtgtatgatttacacacagcgtgtgattgcggatctggatactccaatcagccacatgtacaagtatcgatcatggattgatcaacacctgttgtctgtggatctgcaaagtctccaaatccttgacaatattgccattaaacagcgagtgaaagaactcgttgaccaaatttcccaaactaatggcgcccatcttgctgttggtattgaagtgattttcaataacgtccaacagattttcaccggggaggctgaggctctggatctccttctgaccgatgacatattggccaacgtctacaacgctatggatcagtgtgatatttccgaattcatcaggaacttaactcacactaagcctaatctgcgtatcctcgaaataggtgccggaaccggtgggtctacagctaatatcctgaagctgttgacccctgggagtaggaccctatacatgaactacaccttcacggatatctcatctggcttctttgttgctgcaaaggatcgatttgccagttacccaaacatcgaatacgctactctcgacattagtaaggatccctccgatcaggggttcgatgatcgcaaatacgacctaattctggcgaccaatgtcatccacgccacagcatccttgaacgacagtttaagcaacattcataaacttctttctccgaccggatggctcctgctccacgaattgacacccatatccaaatggatcaactatatctttggaaccctggccggttggtggtacggcgaggttgatggccggtcgggcgagccgtacataggcattgaacgctgggcaaaggaactcaaggccgctggatttcgcactcctgatgctgcagttctggattcgaaccaaccacatcagttgaacgccatgatcgtggcgagaccggaggttgacatcgcacctaagaaatgcgtcactgtcttgaccctctctaaatcaatgtccgtaggtcctttgcttcaggctctggataacaggggatactccgttcatcattctcggtttgacgaagagcccctgcctgaaggacaagatgtgattgccttgcttgatgaagaagccccattcttcgaaggcatggataaccaacgctttgactctttcaagaaattggcacacagcctagatcaacgtggtgttctgtgggtgactcgttcatcacaagcccaatgtcgggacccgagatttgcccagatcaacggcgtagcgaggacgattcgcaatgaattgcgtgtcgactttgctacttgcgaggttgacgatcttgatgtctcttttgagaaactcatcgacgtatatgagaagttccaagtccgccaggaggatgagaccctcaagcctgaatttgaatacgctatcgtggacaatacggtacaagttgggcggtatcatcctttctcggcgcaaaatggacaagaggcgctggcttcaaatagtagcatcgcccttcgaacaagtaaaccaggccgcttggcttcgttacactgggctcatggggatatcaaacctctggagggagatgaggtggaaatcgacacttacgcaatcggtttgaatttcaaggtaagttcgaaggtaacaagtggacctaataacacatactgatatgaaacaggatgtcttatgtgccatgggtattgtcgaagccaaagaaaatgaatttggccatgaaggcgcgggcatagtccgccgcactggccccgatgttcaaagtctgaaagtcggtgatcgtgtcatggtcgtcgggagctgtttatttgggacgcaattagttctctccgagaacctgtgcgagaagattccaggcggcttaagcttcagtgatgcggccagcatgccttgcgtgttcagtacatcgatatactccatctttgacgttggaaatctgaaaaaaggacaggtttgttccccctcaaccttttgacgttttaggtcatcttttgacatattttatagtccattcttatccatagtgcctgtggtggagttggcattgcgaccattcagcttgctcaaatggttggtgccgagatttacgcaactgtcggtaacgaggagaaggtcaggtatctcatggacacgtttggccttcctcggaacaggatcctaaactcccgtaatgcctcgtttgttgaggatatcatgcgggagacaaatggacagggtgtcgacttggcattgaactcattgtctggtgaactattgcatgctacgtggaaatgcattgcaccttttgggaagatggtcgagattggcaagcgagacttgattggctctggaaaacttgatatgactcctttcttggacaaccggagctattgctgtgtcgacttggatcaaatttgttccagaaagccgatccttgcaaagaagtatgtatcgaaggggatgacaatgtatgagactcgacaactgacatattatgcaggctgctgaaggaaattgtggacctactcaaggagcgctacatctctcctatccgacctatcaaagtctttagttctgatggaatacacgacgctttccgttacatgcagcaaggcactcatctaggaaagatcgttgtctcgatgcgtgatacttcaggccaggtcagcgctgtacaaaacatccagccacgaaaaaagcccacccaactcaacagctccggtgcatacctgctcgtaggtggcctcggaggcctgggtcgggctatatctacgtggatggttcaacgtggagctcgccacctcatatatctttcccgaactgcgggttcgagcgaaagccaccgcgagtttgcccaagagcttgccagtatggattgtcgtgtggactttgttcaaggtagcgtgtccaatatcgcggatgtgaccaccgctgtcacacgggctcaaggccgacttcggggcatcttgcagatgtccatgatgcttcgtgatcggagctttgaacgcatgacactagaagagtggaacacatctgttgatccgaaggtcaagggaacgtggaaccttcacaatgcttctgtatctgccaatgcggaacttgacttctttgttcttttcagttcggtgtctggtgtctttggactccctggtcagatcaactatgctggtgccaacacgttcctggatgcattttctcaataccgattggggttgggactacctgcttgcgcgatcgatatcggtattgtcgaaggagtcggttatgctgccgagcaggatgaaatcttacaaaagctcaaagccgctggtggtctaggcaatacggtctcagtgagcgagcttctgagcgcggtagaggcagcgatgacatctatctcaagtaatttgagaccccaagcaggcaacttcggcgttggaattcggcccaacgtgcctctggccgatcaaagaaaccgtttggtctggaagaaggacatacgaatgtcggtgttccataatactggagcagctggtaccatcttgacttctgcttctgacgctggtgctggcttggaggcttttattacacaggccaagggcgacgctgcgctaataaatcaacctggatctgctcaaatgctcgccgtggaaattggaaagaaggtgtttagcttcttgctgaagcctgaagaagatctggtgacatcttgctccttgtctgatcttggaatggactctctcgtggcaattgaggtgaaacagtggtggaaggcgacatttgggttcgatatcagtgtcctggaattgatgggaatgggctctctcgatatactcggagagcacgctgctcatggcatgcttagattgttccatggtgtacaagatcaagctgattgagcgagatgtggttatgtttcactttttgatgtattaaaaggaacaaatcgggaaatagaatcggcgagatatgatagccaggtctcgccacattccacttctttttctccattaaaacctaagaattatgtggcttaaaagtgacagcagagtaatatgagctatactgcacccaccgtttctaattattcatgttctgctcagacttgatgtgatacctcaggctgaggaagtcggaatatcgtcgcccagattcccaatgccacagccagcatggcgagcaagattggctgcagcaccgtgacccctttagcctgagcaatggcaccaaccataaatgggaaaacagcaccaccacccatagaaagggcagctgcaaagccaatagcggcaacgtgaagatttttgggtagcaatcgtgtcgccacaaccacaactcccgggaagatagtccccataaagaatccaacaaaggcaaccgcaaccgcggacacgatgaactcaggcacgagccagaagatgagctcaagggcaattgcgagcgagatgtagacaacaatggacaacttctctccaattcgtggcgacacaaaccctagcacgaatcgaccgactgtgatgccgagccagaagcctgtctctgccattccggattcgaatgggttgccgtgtcggactttcgtcataaacacgacgatccatccaccgattgctacctcaattccgccatagaggaaaaggaagacggcgcatatccaagtgaccttatatgtaagggcaagacgtgtttgggagaatgctcctcctctgcctgggatactggggttctctttttgatatttactactagtctcatcccagaaagcgctggcggagtaaatcagcgagatcacagctgctccggtctatatttcatcgttagtttgtcgatatccagtggctgtagagaggatcgagataccatcaaatagtaataagagtaccattcccatccagctttggtgattagactcgtagcaatgagagggcttattgtggcccccacgccgaagaatccatggaagaaaccgagcacttcatgcgagttcgccatgtttccgatccatacattccatgccgcgttgtgaaatccgctccccaatccaaccaggacgtacataatcaccaagactggaaagggcgggtggatagatatgactgcaaaggcaagcatatggcaaatcggggcaatgattgtgatccctcgtctgccgaaagtctgatgaactgaattgctcaggatggcggatatggcatatcccacaaagggcgaaaggaacactagagaaatgaccgtgtagctcttttgatagtaaatctctagctgaaaagttcaataagatggtcagcgatcctatacagatcaagtaaagctgagttggtgacacaaacatagggaataattgctccatatgcagcatcattggaccccatcacaaatgcacacaaacacgtggcagtcaccttccatatggttgtttttgactcgttccatcttggtgcgacgttcactgcatgcaaaggtgggctttcatcggtctctgaaggcgtagcttcgggcgtatattgaccaaattcgcccggtgtcggtggccaggatggccgtgaggtcgatcccgcgcttctggtcatttcgaatcgtgtcactcccaaggttgaagagttgaagataagagtaagaattgtgagattgagggggagcggggaaaacaagcaaatgtaaccctgatatcccatgtcctatatgtgtagctttatagatctatctctggaacatgatgcataatatctagttccagttccattgcttctatttaacgtcagttaaatctacattcgcatttgaatcaaaaccaatgatcctagtaagttgcctagcgttccgaagccaacatacagccctagaggccaaataaggatatgaaaagccctcgagggtgcccagatagaacaaagtatcttatagacccctgtcaatcttcaaatcgtgcacatcatcaagtaatgtgggcaatatagtaaatgccggtcacgtggtggtattcagcagcgcgtgtttacccgacatcggaatatctttggaagctaatcggagtcaggtgatctgataagccgataccaaaatagcactgaaataactattatgctcagtaatcaggtcggatgactaattatgccactgttctaaggttgaccaaaggagatacatagtgttcaaaaagtctgttcccactgccccacttgctatccccctaacaaccatcgtggttttttttcttcttcctacacaccccccaatgacattatagtgttcaaaaagtctgttcccactgccccacttgctatccccctaacaaccatcgtggttttttttcttcttcctacacaccccccaatggcattaaccaaggatatccttggtttaggtcgtacaaaatcaggtgagctatctgttactcagcgctcagctattatttatacccaccaggccggtgccacccagtcaaagctagcactcgattttaggtactcccgccgaacgatttacaatactttgaaacggttcaaagaacacaatactgttaaatctctcccttgaaccggtcgcccaaggatctttagtgatcgaactcgccatttactttttatactcgcccgccggcaccccttttggtcctataaaacgctgagttgtgctatacctggtcatccatcccgctctactattattaacgttttaaggctaaccggtcttctaaaatataggacaaaaaggaagattctaatcggaaaggaattagctcgacgacgatatcgttttattcaaaaatagcgctctgagtggtctagaaataacgtttaaaactaggtcttctcggatgagtattctgtacaacgaataacaaactgcagaccacaatggtgttggcgctttcggtcggagggctatagaaaagatcttataaatgctaaggtatacattaaagatatttcacaaatggtttagggtacaatctggttaagaagtcgattagagttgattattataaggcgggagaatattattaacccggaatcgaagaagacaggatatactactatttcctatatagatactctcgaagaaggtctacttccattctatcgaccctactctatcttttagtaagataacactcggatccatactactaaaatcacacaggaatggtttaaaactcacgggatatatatagaggagtagctgccgcactcactagatttaaacccgattgaacctatatagcggtggctaaaggttaaactttttgagttatttcctaagctaatatatataggaaggtctgaggaggattagatagtattcaaaaggtatataaagatagtataggatgctattccgcagtcgaagattgattcattgattttaagtatagggcgcagatatatggcagtacagaaggcaaaggggtattatacaaaatattaaatttaaattttacccgagattggcatagggttcaaccctatttaattcgaagtaaattgagtaaagtatggtggtgctatgcatagatatataaagatatatatttcaatgttcatgggtgaaaatgcgggtgggaacagacttattaaaccccactgtatgtaagccatccatggaaccggccatgatcactagggcggtgatgggagcggtgagccaaaaacacccattggtagtggcacaattcgtcgcccgtaacagatggcggctggcgcctccgtaaatccgtaaacctcccaaggtttccatctaggccagatcagcatcttctcgttgaaatgactacttcgcagatctccccgaaaaagcataatctacgggagttccttcagcctctccgggtcgagctcgagaccttgtatgatttgtcctgtcggctatcatcgtcttataaaaagttggccgcggaatcttcagaacactttattccaacggctctgacttgtcttccaacgggtcatgaaaagggacgctatcttgctgtctattttggtcagtcctaccttcgtgtggccttcatcgacctcttaggagatcaacatgtcgaaggacatgcacgggtacggcgcacgttagagaaggcatggcctattgcagagcatttacgaaaggatcattacattgatctcttcacgtggattggagactgtatcgccgaggtggtggcagacagactcgccaacccaagtgaagagcgggtggaccaaataacgacaggcatttctttttgtcttcctataaagtacagttatctcccagactcggccgtgtgcttctgtggctaatccaatgtagacaagattccctcgatgaagctatcttgatgccgacagggaaaggcttttctttaaactcagacctcaatctccgccaagccttgctgagtggatatgaccgccatacatattcaactcacggggatgaaatgaacatgcctgctaaacgccgcaggctgttttctcttccgaaattgaaagtcgcagtcatgatcaatgatacgacagcgactcttgcttcattagcgtactccatcccttccttacccaacacccgtgttgttatgggtctgatcgtgggcgcgggatgcaacacgaccgttcctatgaaacttgccgacttgcataaatccaaaactaaaagcattcttgaaaagcaccctgacgcagaggaaacgctcatctcgactgaatggactctctccaccgcggcgggtcctttcgacgagctgggtattcgaacaacatgggacctccagctggataggaattgccaaaggcccggttttcagccaatggaatatatgatcggcggtagatacactggcgagctcgtccgcatcgtctgttatgattggttccatggagtcttgggaataccacgctccgagttaccactgaagttggttgaggaatattctctttcaacagactacctctctcttgttgttgcctcttctctatccgatgagcgcttagcaagcgagctgtccaagacactccagccatctcccgagagtgattggacctggtcgcctgaatatgcccgtgatattcgggtcattgcctcaactgtgcaggatcgagctgcttctttggtggcatctgcggttgttggtctcctagactgcactaatgaggtccaattgtgcaacacggcacccaagtgcaacaatggagaaaaagtcaatacggaagctggagttactgaacagacggactccgaatcggtctcatcaccaacgcgaggttggaatagcgggcccgaagaactcgctgtggccttctcgggtggagtgattcagcactatcctcactataaagaaactgtacagagatatattgatcgacttctactgcgagctggtcctcaagtaggagggaaaagtgtcttcttgcgggaggccagtgatggcgggctcatcggaactggtgtccttgcaggaactgcctcgggggaaattggggaaatcaaggttactcctaattagatatcaactaattcccctaattcatagtcatatagatgggttataaatattatctcacattttccccctcggagcttcaccggggagaaatgcatatcacatgtcgaaaagccgtttctatataaattactgcctcgctataagtctaggcatcccccacagatgcgaggacacatggagagaaattgcgcgaaagcaatgcccaagaaaccatttgaaagaacgtgtaaacttgatgaatgctcaacacggtcgattctcagttccaagagtacacactacgtcacatgttaggccttcaagaatcacaacctctttcaatttgtagcatttttgttcttctaaatcatcacatagcagatacagtagcaactgctctccctagatcattctccaaatcatcaaatgagcagatggagtagcaactgctgtccataatgctcgctgtagtgtagcccttctgcttaccatctccagccctctttgtcgaaaagcacatcagtggccgtgacaggaaagaactgatccatttccttggatttcagaaccaggctataccagatacggattctatcaatccactcctcgcttgtgtcgatgcgaaccgcgttactgaatccggagatgtgcctgaagaccattagctcgttcaacattagaaatgatatcatggggcatacatctccccgttgttccaatcgtaaatgatcttggacgactcagacatgagtggccgatatccgcatttcacaagcttcctggttcctattagctctaggtactttgtcgtaatcagagtgccctaaaacatacttgtaagcctcgcaaaacttgtgccgaatctcctctcgcttggatatgggataactccaaaacccttttctatcaagggagtctccggggactttctcccacaccagataagtgatgtagccccccggggacgatatcgtcctcatcttacttccccgagtgatacccaaggagcttaggcacagcatcacagccttgttcccggaggtccttgagggcaatcagctcgatgtagtcaggtgattcgacggcctgggcagcacggattgtaggcttctggaactcagtcccagcgataggaatctgcttgtaaattcgcataaatgcgatcttttgggcatcggaaccggcggggcgacaaagaaactttccagcaacatctgaagggcccaacccatcggccacgtctcgctcgtcctcgacctctgcgttctcttcaagcttctcgacaatttcccaggtgccggtgtgaaacagcggttgtggcgatgagttgagggtaacctcggtgccttcaaggccgacgaggtattccaaagatgtggtcattatgggctgacagttgataaaactggaaaggcaattacaagagtttagaaagtagggtagacagagagtgaagaagagaggaagaaaagtttgtgggttgtcctagtcatcacctggtcattctcaggatacacacagcaaacaaaggcaatcactgtcatgacacagtcaaactagatcccatatcgacataactactcagttagctaccatatgcttgactttcatgccatatcgtggccatcacgtttacaccataaatattagttcccagtgtatctgattggaataacgcgagtaggtcaagttgtatgggtctctaactctctaaaataacatccgaaaatgacaatttggtgggacacaggacacgaccacaatgtcaaggatttctgaatctaagaacagaggcagccggaaaaaaagatcccaaaacaaaattcaaatgatgcggttgtgtgtgtattgaacaagacatggtgaatggaaatcctagatagagatccactggttcctaggcgtatttcggtacacgaccctgaccagctgctacgctcgccaggaaaaagaagcattgcttcgtcgaaggaggctccatctccagtgggtccgcgtgtgtcgtcgacttcacgatgggtgaatactcaattccccaggtatttcccaccatagtctgtcgcaggaatatggtctgctggtagtttgttatccagccgtacataatgcgaaggtctaacatatagcctactggctgggccaggagttgtcgcattgttcatcaccatggggttttcatttcgccgatagccttgagcttgtaggtagtcgcgggtcggttgagatcaatgcaaagtcaggcaccaggctgtactgtacccctgctgccttgaaatcaccaaactgcatggatttcatctgggcgtctagagccgctccaacaatttgtcccaccgattgctggaagcggccctagacgccatgttcgtcgcccatggagacaagctcgcgatgtaggtctcgagtcgcaagattgtggtcgacgacttttttcgaccactgttcaacatttgtgagaccccagacagagcctagaaagcttgtccactcccttagagggccaataaaagtggctttcttcaaggcagatgatgttgtgtgatcatcttcgacgaggaggtcagggagagcgttgtggataactttcttggcagttagtttcttcaccattctggtggattcctaatagaatcctcgttaatataccaagacagcgtagcgtgtaccgatcctagactctagagtctgactcacttgaagtaagagccgtagaatgtggaaggagaggatatgatgtaggaaatcctagaccacagtggtgccggagaagtgtgtagctacagtggtgatggagaagaaaacattcttttttatatgggaggcgcggtttggtagtcatctcgcagaagatgcttctccttgtttccagaggtagagatcgttgtacagctccatgccagtagcaaacaatctgttgacaaacaaaagaagcaaataacaaatatgaaacaagcaagcaaacagtgtaagcaagcatctgatccacgatctatagagtcattagtatagtctacctagttagttgtactatatggttaatgacattactattatatgtcttttttggtatctttttgggtgcccgttttggtgtcctttttgatatcttttacattactattttttaaggatcttgatactaccatagtactaccattacttgggtactatcgactcgcttaattctctacgatgtagacaggaacgacccccagaccgtaaaaagtaggacaggagtgtagctcctgggaaaaccgatggacgtacaaggagacgatcaaccaaaagtgaactgtctagatagatggaagattattatctagctaaaccagaggttgcacgtttgcaatgtttatagaagttgccagctatatcaacattcccacttcttcacttgcttcttcttcttctctgtctatcttatttatcgaatagacctggcacatcacaccagagtgaataagaataagatcaataaaattgagattacatagtcagtcgactgtataggtgtgcaaatagttttgtagagtagtttctcgttgccaagtctctggtctccgatttcaatatatatcagcccctatttggttagaatccgccaagaactgaacgcaagacttttcctcttcctctattgcgatatctcaacgcgaataatcatgaaattcttcgatgtaagagaatctctttcattttttcaagcagcctgattaacactagcaccaggtcgccgtcacattcacggcagaccaattccaaggcatctaccgaggaaagcaatatcacgaaccagattttgcagaagtcctgaaaagagcccgagaacatggatgtgaaaggaccatgctcaccaccatgactctagagggcgcaaaacaaaatttgcaggcagtgagggagttccccgcgatgtgcaaaatgaccttaggcgtgcatccgtaccatgccgccgagatctatggacagccagagtcccaatatctgaatgagctgcgcgaactaggtgaaacgctcctagctgagagtccctcgcctttggctgcgtttggggaaatcgggttggactatgagtacctggatcgggccgataaggaaacgcagcaacgcgcattccgcgaccaattagagctggccgtgcaattccagttaccgttgttcttgcatgttcgtgagtcagccaaagattttatttccatcatcaagccttttctgccaagactgtcgcgtggtggattggtgcattcttttgcagggacgaagggggagatgctccagctcgtggaactgggtcttgacattagtgtcaacggtatctcattccggacagatgaacagttggaaatggtcagaaatattccattgaacaagttgcaactggagactgatgcgccatggtgcgaggtcttgtctaatgaccccaaaatcgcgggttatctggaaactgcgaagccgttgccggcgagtcggaaacataacaagtttgtactaggccagatggtcaagacacggaatgaaagttgtactatagagcgtgtcgggttggttgtagccggtttgaagggtgtcgctatggaagaagtggctgaggccgcttggaacaatagcagtcggatgttttggttgtgaatatataccgttgagcaggaaaattagaacaatgtacaggacttgaagaatctctttttgatttagctggtttaattggatcattagaagtatcgatacttgaagctcatttgtagcatgcttaactagcagagtaatgcagactagtagtagttatactacgtaccccaaaatgcgccgtgtagatctagtagcaacaagctttttcctacgccatgaactcaaaagcaatcttggtagatcgacgtagatgtaaacaaagcccttgtatcagcgaactatgactggtgccctgaatagacatgcaggggggaacacaggggtttcgatcgccccttagggcccgggcatgaggccgagccccaaactggttctatttcacaggccacgatcggccgaaatgaagtagacagaatggagatttgtcaatctcaatacttgattactggacaattaaatctataaataattgtgacgcgtccttttttgtcttttcgggatcaagattcctgaacagaacttggctcacggagattaatacaggttggaatgaaggaagacgtgatgccttctttttcacattcgatcgctcagagcccactatgttgcccctcgagtcgttgccactatacagcagggttcgtttatatggcgatctgagtatctgaacaacacgaagtagggaaaagatctatatgactttctaatgggtgtattgagatcttaaatagactcattgattgtgttaaattgtcaattatttacccttaaccgcctatgcgaagttaagcacacatcatgatggagggccacggtttgttgacattcttgacgttgcgagggccatcgctgaaccatcagcgcatgggtatctgccattcctccacggagttatgtggaatgttattgaccactggccatgtatttatactaattgctgtcgaccagctcgatctttattcacacttctcaagcctctacactcttaaattgaccctggtggttaagtgtttatcgaagtcaatatacaaactttgcaaagacgttgtaagttaatcgctgaggactgcttcgttctttcctcaaaattcattcgatgcggccattgtcacttccgagactaacaagcgacttagaaacacatcaatcacaatgaagggcacattgatcctctctggtcttctggccaccactgtctcggctcacatgcagttgaacaagccttaccctatccgcagtcccttaaacaaggatgccaagggcgagaaggattattcttacaccaaccctctctccacctcgggtagcgattacccatgcaaaggatatgccaatgatgcctttgaggctgtggatacatggcaaccaggctccacccaagagatgtcgttggaaggcagtgccacccatgacggcggctcatgccagctctccctgacttatgacaagggtaagacattcaaggtcattgagtcgatcgagggtgactgccctattgctaagaagtaccaatttgatgtcccctcggacgcacccaccggtgatgctctgttcgcttggacctggttcaacaaggtcggcaaccgcgagatgtacatgaactgtgccatgatcacaattggtggttccagcaaccacaccgttgtcgactccgagggccgtgtggctaaggagaccccaaagcaggcgctcagccagaagacccatacccacactacgaacgcgaagagcagcttcgatagtctccctgatctcttcattgccaacgccaaccaggctggcaagtgtgtgaccgtcgagggccaggctgttcacttccccaagcccggtcccaaactgatcggcaaggccgatggccctggctacaagtgcgccgaccatgctcccttcctggacgacagctctgattccgcgacgaagtcatccaataccagcacctctacctccgccacctccactacttccaccacccccaagtccgagaaaaagcctgctgtcatcagcacctcctcattcaccacgaaggcgatttccaagatcgcccaggccctcgccactccttctgtcgcagctgactcccgtgtgcaatctgccgaggactcatccaacaaccagtttgtcgaccatgtcggtcaatggtcttgccactctggggaaattctttgctccccagatgggttgacctttgccatgtgcactaacggcaagcccatcttcatgggatccgtcgctgctggtactatttgccgttggggagctatcactgctcgccagtaaaggtgttaattctttttttcatttctcttgccgattgtttttttttttttccgcatacatcccagtggatattttgagttatcccagtctatagactgatcagtcgagtgaggttcactcgccaccgccggtcttcacttttcacagttcatgatttcattcagcctggctttgggcactctttattgttcgtcttatatttgtttcacccatgacctgttaagcgatgacccagtttatgtcgttattgtcaagcaaactacctaatgattgagtgtgttaattcaaaaattctatacatcctctcaagacatagttctcccatagaacgtcaaacatcaaagtgacaggatcaaataaagatttagtctgtatcttgtacaatgccttctcactgtgttgtcaccgtaacttgcagatggatattcacttacaatctcagcacaaagttagccgaatcagtgttggtgtagatcatctataggtctgcttatcatagagtatcaacaatcattccttccctgaaatgaattgaaaaaaatggaaaaggtggaaaggtcgaaaggtaaagtggcacctatagagacgtgaccaagcccagcgccaggcggtagtggcttgcggctgccaccgggcagcattggcttccgggtgcctatttagttaagagaatccgttgtttacttttttctcttctctatttctctggcatctcagatactcaccacatgagtttcccaatatgatcaacccgggatgactcttccaatttcctacaatcctatcagcttttacggcaagtcttctggtgaaggcttggacccgtacccatttgaatgaaagaaagggttcatggtgcgggtaaatgaaagaaagtcccggagagcgagcttcttgatagcttcggcgaagtgaagtagaacctcaaatacgtacggctcactgacgacgctgctatcatctctctctgcatacatgacaagaccgagccatcatctaccctgggactttgattcaaagggagacatcaggaaggtccgagtccaactgtaagtgcagtgtctcttttgaatacgaagttttacaataccaatgatgctactttgcataagacagatgatctcgtgtgatacgggataaatggcttgctgcgctatataccgcgagctcttacgggtcaagatctgcgacctgctggaattttcacaagaagcaacaatgatctagaacgatcaagaccccaatttttggtctccggatgttcatcgtgagagagtctatgtggggcttggtggcattgagagcaccaatctttcgcatttcatacccttcgagtctcctctcatgttcggaggtgctttgagcttcagtcaaagcgttgtatggacggccaacagtcatcatatgttatttttgatcacctggatgagcctaccctccagtagggggggggatgtatcgataatgtgtctgcagggagcctccttcaacattcattcgtgactcgtaacttctcttcccaaactctcatcctcaagatgtcgtcggccagcagagaagcagagtcactttcgcaaaccttccatgaaattgcaaacaaaatcactgactcacaaaagattcgaggttgcacacaaggactgcatcagacagactggctgaatggacatggtccttggttttgttcgacaagtcactgtgtatatctggaccgcgattcggattatacgaggcattgaaacctcacattgtcccctgggcatgatcaggtatcaattgccatgattacggaggaggaagcactttccggctacttttgtaatgggttcaacacagaggatttctatctctgtttccgatttgctgagatcctcgacatcgaaaggacaggcccagccagacagccataccttcgaaagtcagtctcctactaagatcctgaggtggagggaagatgatggggtcttactctacgtatagttgtttaccaaaattcaccttgtgccatggggccttctctgggccttctcctagtgcaaatgaagaatactacggacagagcttatgattttgggctctaggattgccatgtttgtcctgtttgataggactatgaatcgaaacatctctctccccattttagcaatgtatgcgaagtggcccgctaaatggaatgaacctggcccaagatattcaactgcacttggatcaaggagggcccgggtaaatgtagctttttcctaggtgcatctcttgcgagatctgtcggtgggcgtggatcaaagacaggaacatgtcactctcttttaaaacatgttttcgagtccctaaataagtattcgctgtgttttctctgtcccgtcaagcttcgagtatggaaaccgccaaacatgataaaccgaaaacgtttgctagagtgaagcctgtcaccaatgtagagcttgatgccttgcaaagaacgtcatcatcaacaatctaccattggttccccgcatggtcggatccggtacgccgcatgcggaaagtgaggctgaacgctattgcgtccaggaacacgaaactcaaatctagacccctgacgaagttacaggatatagataaatatttatggggcaatgtattcattaatattaaacgtgacaaggtagtctcgaaagacccaagtatggtcgccagatatccttcaacatattgtacaatccagtctaatcacaaacatagcagtggtatcttggctttcaaataacacaaaaggggcatagaatcatcggccagtgcacgagcactagtctactcagaaaagatactgtaacagcaagcatccgacagcaacctagatgttgccagtatacgccgagttaccatagccatagccaccggcagcaggggcagcagttggaggattggtggtgttcttgtttttgttccaagagttgaaccaggtcttttcgttgtggggctcggtacccatctcgacgtcgtagggggttgggtggccaggtagggtatcggcggcgccagtagccatggggctattcttattgcggcgccagaaggccttgcggctgccgttggtgtagccgttggtaggggagggaccgaaacgcttctcgcgcttgtggtggcgggcgagaaggatctggaagaggatggagatcaagtagaagaagctgggggataaattagcatgattcagatagccgtaatccggggtacactcacattccgataatcgccactgcgaagacgaccttttccagtttgcaggccatgctgaatttcagacttgccgacacggtcgaatcgtcggcattgcccgtgcccattggcgtgtccagtgttccggtgcatttatcaactcccttgcgggtcatgatggcgatggcgatcatcgcgcccacgaagcatatatccagggcaacgcccaggaatgcgaagaaggctacaccgcccagacagcaggttaaaacgacgccgagcagactgtaggcggtcgctgcacctgataagccttcaacggccttgatccatgtcgcaatgtgttggtcatttttggccaagacagccagaaaatatgagaagatgccgaggatgacagcagcatcaaggaactgcagaacacgcagtccgagattgaaaaagcggaggattaccccgccagctcccatcttgtatagtgtatatgattatttgggtatagaggtgacagtaacgacaacagggtccaggggagaatatatgaaagaaactcaggcagcaggatttgggcgagttaataagggtggaccgaaacaattggcgatcagtggatggcggcacaatagggtacaatagtacgtcgatcctggacgacaccggcagctcaatggccaacggcgtctgcgccacactctaaatgaccccagatgggcccactcggtgatgtcagtaccatggattggggagtttagggttccaccctggctgtctccggttagagagttcgccaccgtaccacgtgaggaaaaaaatcaatacaatgttgtagtgctccagccacactgccaagacaatttcaacttctaccatgacccttacactttatactttatactatccatagattccacacatatcattgcttcctatttataggtaaccagccttcacatgatcaactgttccttgaacctggtccgaggtgttcatcgagactttcagaataaagctagcacagattgaacagtatgaacttatttcatatcctttcatgcatgacacaactttcatatacagaccatgttgttcgacaccgactaaccagccactactgttatattttactttccagcgccttcatattacataatttgcctattttcattggccctttcatccatgggtgtggctgtgctgcactgccatctagatttcattgtatgagcccgccacgctgggaatgacgtctgcatccacccatctcactaggttttacacgccacgttttgccgtttacaaacattacaaacatacgaggtacaatgggaagtttgatattaaaactgggtccgccacatggaatggcacatcctcttggtggtcaagtttgcggggtaaccagaacgagatgcagtatagcaaggcgagagagattgaaaaaaaaaattaatatgtgcccatatggtacctgtgagcttgtgatccatcaaatccccaagctagcgcgtgtcgcctaaataaatctaggatatggtgctgctaaccggacgaagcacatttttagtcaggagcatatttatgattccggccttgtaaagattccgtcatcgacccggacggacaagatatatcggaccaatgctaggtaggtcgtagagtggtatgactgccgcccaggttctcgggcctatggacacctgttgcccaaagctgttcaaatcaagcgagcttcttggaaaaacaggaatatggccattaatgcaggtgttgggttgaccttgccaatgtccagggatgtctagcaatgaactctatcaggctctcgtgttccaacccatattttactccattttgggaaatctgaaaatgaaagcggcaaaatcctcggcagtagctcgtgaggtatggaagtggacggtatcttcttgtcgaccatcaggagtcttcctggcgctgcttttcttgttcagcgaaagcacggagaattgaatccagtccctcattacggcgagcgagtagcatcacgtcggatacattgacggtagatctcccagcgtgcctgaaaaaaaaacgaggttagtacatttcttattagatgtatgtaccatcccgaacaattggctactcaatcgcagcaatgcgtttgcttacttcgcaaaggattctagatcctggctgaccgtctctgcgaacatagtcagttataagggtaaagccgggaacttgaccaaaaaagtggaacttacctatctgagcccaaaccatctctgtcaacgcaccgatgaactgcggagtggcattgacgcctagcctgatagtctcctcatccacgatcttaccgatagacaaccacagcgcggatttcaagcgctacaaaagagagttagctagttacataccaagatcctcctgagactgacctcctccagactagcctcttcagtctgctccatggtgatgtgatagtgcaagacaacaagccgagcgcgtgcccatataaaaccaacaacatatgattggccgacgacgcgtccacggattaacggctaatccggcaacagtcccacgctaaccccgaaacagacatctctcgttgcgggagccacggaatatcgaagaagcgcaaagcaatgacagatcccctcaattaatccctcaacccttaatcttttaaaaatcccccctactccactctcaactccctctgagtgtcctcttctccaaccaccccattcagcgggtagccaccgagcacctcccaccttccacaagccctcaaccaaaccaaaaaaaattaccaccggccaaatcacacacacacacacacacacacacacacacaccatggccacgccaaagcccgatctgagcgacgcggccgccgcggccgccgaagatttcttcagccagatctacagcttcttcgagctggttgtcacacggctgttcaaaaacggctacgcctccatcgtgcagatgaccgagatgagcggcaagcgctgggcccgagtcatcggcgtcgtcgtcgtgtacctaattctccgcccgtacatcgagaagatgttcaagtggatgtacgagcgcgaccgtcgcaaggagaaggaaaagcgcgagaaggagagggcgcagttcgggaaggtcaaggtctcggcgaactcgctgcgtgctggtggggacaaggggaaggtccttggtgaagtcgataacacggatgacgagctcgaggatgaggaggatgttatggctgctgctagtggtgttcctgagtggaatgacttggctcggaagcgtcagaagaattatattaagcgtgtcaagaaggatcagcgcgcgcaggatttgagccgggagcagattttggagttgttggattggagtagtgaggaggaggaggtggatgcgaaggtcaagaaggatctatgagatttcgacttgtcttggtctagggctgttcttgtatctgtgcattgcatgggaggttatgctgcttgtattgtttaatactagattctaatttaataagacctccacggtctctctagctttaagcgaattttctgatctactcgtagcatctctactgaggactctttaccttgcacataacatatacttggaagtcataaatctactatttgcatctaaagaatgcatccaatccaatcatacccgagccagaactttatcctgggccgttctagaaactatgtagcgatcgccggatcttatccgtattcatgaacaattcgtaacatatcaccaatgtctcgcaagagatcagtgaagcctccgtaaggcctcgatcattctcttgacctcctgcacgtctgaggagccaacatcctgcacaatctcctcctgcatgcttggtgtgcagtgcaagaactgctcaataagttcgccgtccacgaaccgatatggtgtatcggcgctgcgcaccatagttctgaagccgcggaacttgtcgaatgataagttacccaacgaggtgactttggtagaaaggacagattgcagggtcataaggaagtcttgatgttcggggttgataacggcgaagaggaatatagagccctcgacctttgaatgggttagtaaatgagcctttaatgccggtcaaccaagtcaacaaggaacttactgttgctatgaacgctcgcggtgtcaccgtaatgctggacagctgtggaatattaactggtcggatacgattgaccatctcccctagtgacatctcgctagtggggatcaacctgtgcttgtcctgggcggtgactccattcgtattccgagcgagaacgataaggtttccctcggcgtcgctctggaggaatgtctcgtccccaacacaggcaactgctgtgctccagacggtctggtagtgacgaccgacttcggtcagcttggcagcttccccagcgtggcccggtgtaaacctcacaaggcaaaggctcttcatgagatctgccactgcgattaagttgtcgacgactgttacatcgactggtgcggtggaggtccggtatgcaacaagcttctcgagcttcattggtccaacgttattggctttgactctatacacaacaacctaatcatcgttagtacagggttcaaacatacacgcggttagtactcacagtcttaacaagtgccgcaacaacgcagtcgcccatgatagcgagggcccgacaggcccccataaccggcagctcggcgacttggctcagcttgcggccgtggtcgacttccagaatgaggatccgcccgcggatcgattcttcctggtcttcatctgcaaatgccgtgccaacaataaagcggtccttcgtgatctcttttccattttcatctttccctgccgggagttccgcacgaacaacgctctccaccagttcgtcggggcccatttctaacgcatcaaggcgccggaacatgatctcatcagcaaggacaaagtagcttttgacaacctcggcgccattctcgagcttgcgatcaatcgtgccaattccaaatgccttctcagaaggggagtatgccacacgacggacagtcgagcccattggtaaagtttgaatttgggttgtgcgctctctgtcaaccagcgcgatcttcagctctttctcggttgccacggcgatagaacctgggaacgcctctgcatttaaatggcatacccgtgatgcaccctcggagttcactgcggagtagatgatccggccctcggaaccatagattaggctgggattctcgcaggtagcgaagacgttgtatagcccgtcacccttggggagtttcttgaatatgggttgttcggagccaagaatcagcttgttcatctcactaagcgagtagtcttgtgggttgagtgagaatgtaatgacgcagccatcagccatggagatgaagagggtaggctggctgtctgcgagcacttcggctacaagaactgatcgaggaaagctctccccagtagggccgagggactttgtttggagaacagtgaagtccttaatagccaggattgacaccttggccgattgcgggaaccctgcgatgcaaacccctgttggcgttgatgggacggtcagaccggagatttgctggtcagcgccgagatctttctgcgtgatgatctggatattgtccctgatatcaaaggatgccacgacttggccgctaataacgagaaccagatggtcctcattagccgacacggcggtgatcagcttctggtcctgaggagcccattcaaatgtcaccatgccgctttctagatcggccactagcactcgttgttctgtgacctgaagaatacgaccgccctgaagtcttgtggcgagaagagtgcattccgtgagtgaaagccccaggaagttatccaattcttcaacttcaccgtcagggttaaattggaacacacgtgtttcgtcaacaaatgtaacaataagcgtatcaaggaagtcgcctttgcttcgagtttgcagtccccagagatcagtgatgtgttccatttctcccagcacacctaactcctccatgccaacaccactccgcacactgcgtaatgtcccgtcgtcaaaggcaccagaacccgtcacaatccgagcctgcccagatgaaaactcatgcgtttggctctcgtttgtgcggttcccaagatccataatagtaaaatcgagaatcggtgcgatgttagacaatgtctggatcacttcaaacgagcttccgtcgagccggaggacctgagagtcgccgtgatgcgagccaacaaacaacatgcctccgccgagatagaccaggaccgatgcacgagacgtcttgcccagatactcgagcttccagtcatcaatttcacctaagttgttcaggatgaaagacaagaaaaatagccttccatagtcatcagccaatagccaccgctgactatcgaccttctcccaggccacgaagaccgtcgcttcgtcaagattccgcgtaatcacatcgttggcattatcgtcgatatacttgatcgacgtctccccaagcacaatgagaccacccagcggagccgggatagggataagatgcgacgatccaagatcaagctcctgtccaaattcacccccttccaacttctgcacctccttgaagctagcatccgccggagtccccgaagtgcccggcgtgaaatccaactcgcggattcgaagccgcaccttctgctggttatcttcatagagcaatgccaaccaaggattagattccgaatgcaagaatgccgaagaccgaacgaaaatctcgtcgatgcgggatgcagtcggcttatcaagttcccccacctgcaacggcaagtcagcctgggaccctgccatcggcacccggcctcttttcttcgtcggctgcacgatcggcacaacaacaatcacaccctcgtatacttccagcgtcatgaacctccccgtgggatcgatcagacatcgtggtgcgcattgggactcccggcatgagggctcggagatatcaatacacgagcgcgcagtttttatctcacttgattcgcggtcccaggttattgtaaaatagttatattggtctgtgccgatgaagagatggtcggttggggaattcgttggcgcgggtaggcgtgcaagcatagtgacccgcgcattcagagcacgggtcgcggtcaggacgagtccatccggcgtgagcgtgtagaactcaagacgactggcttttctgtgtgttggcagggttagcttgtcatcgggcggcgggtcggcttaggttccgtagattggcgggatgggactcacgctgcgactaggcactcctcgtccggagagaaaaagtttagcttcactgcatggcgaatgctgcttgcccggtggatgggcacgacataagccatggtgattcaatagcccgaggtatctggacagcgcggagctggttggggcttaagcttcggcgcagcaccctgcgggggtgggatatctccgagagtaaaatgtacaagggattgagatggcggaggttgacggtgttgatttatagattgcacattctctagttcaactctgttagggtaggattgcttagtcggtggggaagatgaaagaggttgaggttcccgtgcaaatgacgtctaaagtccgcgcttacaaccgaaaacatctcgacagtcgttcttagttgcaattgaataaatagttacatacatgatggttcaatttgaaagaaagagaaaaagattaaattccttttaaaatcacaagtctaaagtcatacgccgcccaggcggcagtcatagctaacaagctcaaggtcctaacgtgaggccaatgataggaaaacatgcagcgcgaaggaaacaaaaggcgtatcgtatggaacaaaatgataatatataggcgcgatcatctagcatggtgcaagtgcaaagaagtgttcgtaaatcatgagatcatgaccagacgtcctcctggtaactgccgctgctacgcatgtgcttgaccatctcctcgcccttctcagcgggcaaaccccgttgctgggcaataatgtgaccaaggaccaaattgacctcacgggccatgttggcagcatcaccgcagacgtagaagttggccttttgcttgagcaggtcgctgaccagctcggcgttctccttcagacggtgttggacgtaaatcttctcggctccctcgcgggagaaggcagtaataatcttcagggagtcacccatttgatcttggaaagtctaatgaatcatattagtatgaatgtgggatttcaagtgtaagagggtattgtcataccttgaactcatccttgtacatgaaatcctcgtcgctcttacggcatccaaagaacaatagtgttgtgccaaccttctctcccttggcaacaagagcagcacgttcctgaatgaaaccacggaaaggcgcgacaccagtaccggggccaaccataatgataggcttggccgggtcggaaggtagcttaaagttggagtgacgaacgtggacaggtacgtggataccatcgtacttgttgcgaggaccggtgattgagtaagtcaggccgtgggggtcaggggaaggatcgccgttctgcttctgcttgagagccaggaggtagttggtggtgacacccttgaccatgtgcgaggcacccggcagacgaacagactcgacaacagcggtgatgctgatcttatccttttgaacgagagatgacgaagagatagagtaataccgaggctggagcttgttgagaccctcaataagcaacgagaaaggaacggcagtgaacggcttagaagtgatgctttggagcgcctgggcaatggtaaagcgctggtcggcgatcttctcatggaagtaatccttatcgttacccaagcggaccatttcgaccttgctctcctcatcgggagcgaaagcagcgagggacgagacaaactgacgagagacgggggcgcagacttccatgtagtagcggacagcggcatcataggtggtcggggtcgggataggaaccttggcagtgacatcgatacccttgacgttgatcaccgagtgccgcttctcctcaagaccaaagacctgaaggaagcgatcgacttcggcgccagcgttcgtaggccagatggcaatgtgatcaccagtctggtagctgaggttgctaccagcgatgctgatttccatgtgcagacagttgcggtccttgacggtgaacagttcagaggattcaacaatcggggcaatgtaagggttctgcgcggagaagggacccttggcgcgatcttcacggtgggaagcagtaggctcgcccaggtagacggactcgtcctcgggggatttctcatcatcctcgacaacggagaaaacggcttcgtagacagcttcgcgttcctggagactcatggcttccgacagagcagcccacatgggctccttccaggccaggaaatcctcttccatggttccggcgccatcgtcgccctcgccagcagttccaatgcgctgcgcaccaagtttggtcagagctgcatcaacctgacggaccatggcgttgtagtgctcataggtgttgtttcccaggccaaatgtgacatacttcaacgaggacaaaggcttatcttcggcggaggcgccgctctcgaaggcgacgtcctccccggtgaagaattggtagaactccacggcgttatcggtaggctcaccctctccgtaggtggccagcacgaagaatgcgaccttatcatcggggaatttgtccaggttctcgtagtcatagtcctcaatgtcagcgaccatagtcttcagtccgaagcgctgagagccttccttggcgaggcgagatgcataatcctctgcagtaccagtctgggagccgtagaagatgacacagttcttgtttgtctcttccatcttctccacgatgtcgcgggtcttgccgcttttagcagctccattctgagtggcggccgaggaggcatatgggtctttggggacagcccagtagctacccttggtgaaataggcaacgctacccaccaagagagccaccaagacgaccaaatcgagtgtatccagctgcgccattatggtgtggtgcgtacctcgcggggaacaggggaggggtttgttgaggcgcgaattcccgccgggaggggagaattggttgaatatgttccaaagccgggagagcaaacacacaaaggcagtcaagtaaaagaagttttacttcggcaaggatgcgcccccagcaaagaggtctaaacgacgtgtatgttgtacagaataggaagaggaatgagagaagccgacaggtggtctgatcgatccactcgtcctgggcttccggactttctgtggaccttcacggggcaaatctcaccgctgtctgcttacgttggaaactccgagtgtgaagtacatacgaaagtacagaaaaaggtccgatagaatagaaatagcgaaaagtagatcagaaaaataagagtataagagtataagaatataaaaagacactcagaccacccaacccgttttatagtgacaatcgccgagggcaagtcttcggaagcaatgtcggccccaacatgtatggatcataccccgtactccgtaccgtccggcatttttcctaacgttatctagtacggaatatcaaatagggacattccccggccctggagaagaaggcggagctcgggtaagagaagcggctttgctgttcgggaaacgacaacaggcctatgttgtctctgtcgttctgctgcggaatagattccgctctccttccgttctcttcgcttcgagaagatctacatcagaacagctcgaggcttgatagttcccctaacgtggcaaattgcctttctgggctctcggaccccggccttgacatccctgacgtgtggggaagatcgtctatgtagtgcattgtgcgttactctacggagtcgatgttgttgagcttcgacgtttcttctttatatggtgcatatatttcccctggccataatgagaactatattttcaggcttcatctatcgtatagattctgagaatattgacaatataatatcttacaggcgaatgatgtgccgagcccctgatacgttggggttatatatatccaaacacagaagaactatatcatacccaattgcatagcatacattcctcaggtccctccacgggttctcaacgacaatatacatttgtttcaagtattctacttcgtaccccgcgcatttgaaaccatccgatccgacgtcccctgagatccttgttccttacatcagacctgcagctcgactatgacaagcataactattatactataactatatattagaggaaaaagaatgactggataacggctctggatatctcaatttcttctaggcgatacaaaggaatggaaaaagggtcaacaacaaagagaagccaatagacgagtgaggctctgtgggggagacgtaagagccaagactacgcacctgggacagccctggaatgcccgatggcaaagaaatcagctgaacgtgtataatatatgaaaggaaacataatttccaggactatagactatagagggtttcaaattgatcaataatgcaaaatgctagttcactagatataaatacatctaatctgaggcttaataataattctcctcccagatgtacccgagcgcccgataaaaacatcaagctctctcaactcttatgccttcacaccccttggcttcttgaattggctatgtgcagcttgcaatctttgattcctgacatgggctgcttgcaggtttgagcaatgaggtcctcataatctccaacagtacgtattgcaaacactatcgttatcggagcaaacggactcggtctgacatatgaatctccagtggcttcacaccctgccaaagccggcccaggccaggcaatcctgcccctcattcccgacgacctcaaatccgcatcgtatcataatctcgcatctccatcagaacgccgagggaccaggaccgcccagtccactcctttgcacagtcgcgagtcctctgccgtccgaggaagacaagttgatccctccacgctcgcccctatccatcctcgacgcggtcattccggttccaagagccccgacgtatcgggcagtcgccctccaggatatgaagtggggttagagagacggccctccaactcgtatggtcaccaccggcagacctccatcgtacacggtatgcagcattcacgaaacaccagtatggccggatcaaccgcttccacgagccctttgagcccggagatcattgcttccctcggtcgcggtgcgtttgacgaggcgacccttcctgcgaaatttgatcctctcgagacgcactccggttattcgacaccgtccggaatatccgttagtcatgcgttgccgccaacattgagtacgatcaaagacaatgacacaacactgagggatgtgagtccggccgccatacttcacaaccgaatgaactcgggaggaaagccgagacgcgagcggtcagatagtcgttcacagtccaagcatcactcggaatcgaagacggttggggaatatgcattgcatcatctgttcaactcatttgtgggacaggcggacaacaagatcaaccaggccatcatgaagctgggggaatccgatgctcccgtggaggaggtttgcggcccaggagcagatccgactttcgatcaattgatatcggctttgggacatatcgctcggcagaagccgaaacctctgattgacacaattatgttctggcgcaaggctaagggtgatgctgctattacagcgagacagatgctgaatgagcaaagaccctcgtccgctgccacggaaaatgtccctctcctgcgccgcaacactgagccgacacagccggctgatcccactgcgactccagaacgggcgcagcaatcgatgccctttatgggtcgtcccgaggaagtcgctttgatagagcgacgcgcaacggtctcggtatatctagtctgtagagtcttgatcgagatcttccatcagagtagtctggcttcaatcactctggacatggcggatcgcttagaagacattgtgtttggccaggtgaaaacctctgacccggaccagatctcggcgtcacctctgcgaatggccaattggagaatctatggccagttgctgggtattatgagtgaatccaatttctccggcgttgcgaatcgttacttgatggaactggagcgctaccagaaggaggaagttacacgggggccatcccgcgaaagcgattcaaagtcggaattgttgatcctctgcatgcgatatctgcgtttgcctatgacttcagaagggtggccaaagtcttgtgatttcatgcgatcgttggcacgcttgtttgtgaatgctcatgggcagcgcatcaaacaggcatactgctacgtggttgaaaagcttcttctgcccgtcgctgccaacccaagctgcgatctttcactgcctcggtggaaggaattcgtggatttgatccaaccgcgcttaacacagcttcttatcaagcctcgtcattggacatcttccttctcgttgaatgtgctgttgctttgtatctccaacaaagagaccttttcttcacaatggcttcctatgatttcaagcttgcctgcacgtttgaaggaccgccctactcgtgcacccgccctccacgccatctgtcgtctggtttggacctatttcttccgcttctccgattcccccacaaccactcttcgcaaggtcgaagaggtggcaaagattgccctgccgactggcaagaaaacatacatgagtgcagagccggtctttgccgatccgttgatccagctgattcaaatcatcggtttcaagcatccggatgtctgtttccgtagcattattttccctttgatcaactcggatctgttcctatcgggcagagagttgaagatagaacagatggagccggagaaaatggttatcggaatccgcgcttttctggctacaatgtcggatctggagacaagtgaccaattatgccctccgatcccgactggctcgctcccgaatcctttcactgacgtctcaacccctgtgtatttccatcgaccccagctgctgaaagagtacaaagcgcctaatgcttctcagaagcaagacccgaccacatggcaacctgtcaataccgcgagactaagcgataatgtgaaggaatactatttccgattttgtgaagtcttaggcaagatcactttactctgtgataacacattcggcggccaagcagttctggacgagaagttcggcggaactacgcctaaaactccaatatcggaagctttcagcttcggtcgtcgtggtgatgaccatgttacaacactggaccagaagcaaggattctacgatttgctccatgtggcagtccaagcccttcctcgctgtctctctgaccacattccattcaactcactcatcaatcttctttgcacgggaactgcccacgtccagtcaaatatcgctacttcatcagcggagtcgttgaaggctattgcgcggcaattgcacgcccagcaagttacaatcggctttgctagattcatcttcaattttgatgagcgctactccactatgtcagacgaaggaatgcttggaccgggccatatcgagtccactctcagactatatgttgagttactgcaaatatggattgacgagattaaacaaaaaacaaaaggcgcggcagcgatggatcaactggagagatccatttctggcagccgagctctgcaccttgatttatcgagtgtcctcgcccatgtggaggagattgagtcacatggactctttttcttgtgttctcaatcaagacgtgttcgagcctttgccatcactgtcctgcggttgatcacggaatttgacagcgctctcggaaaagaaaacacaagaatcatccggatccttgaggctgattctcagcaaatcctagatgtgaatgatgagcatcttaccgtggcagagcgaagccgaatccaaaagggcagaagaagaagcgcctctcaaaatactcttatcgaactgtgcagcagtgaagtctcttatgattcaacattgtgggccaaggtatttccgaacatcatccgtgttagcttcgagacttgcccgttcgctgtcaccctaggaagggagattgtatgtgcacgccttcttcagatgcacgagattatcacgtctctcgccgagagcacaagatttccgcaatatgctcctatggatacgtaccagaatcgccccattgtaagaaccaatgtgacatctgaaatccttgtcgagcaatggaagctttacttggtcatggcatgcactactgtcaccagtgttggggctcaatcgcaaagccagctggcaaatgctcagcatgcgcgcaagacttccaagggaacccatcaatctcaagacaagatcagctccgctcgaagcctctttgcatttgttatccctctcctttctgctgaacgggattccatccgcagtgccatcgttgttgcgttggggtctattcatcaaaacctctatcgcacgctccttgagtctttgcagtatgccgtcactacttgcaacgaggaggcgaagatgagaattggcaaccactaccgcagtcctagcagcccccgccggaacaggaagactgatcgtttgcgcaccgaggtaacgaatgtttacaaactcacatctcacttccttcaagaccccgaggtttacaatgacgactggatcgtcaacaaccttgttacatacgcaaaagacattcgaattttcctaagtgatgccgaggttcagaacgactgggaattccagcgcttgcgattccatttctgcggactgatggaggagatctttgaaggtattaatcgtgctaaggatccttctcgctggatgcctttcgagtcgcggaagtctgctttctctcttatggaagactggtgtggatactcgccaaatcaatctcaaatctctgaaagagaggagaatatgcgcaagtttcgcatggcccggccacatgagactggtgaaatgaaaaataccgctgctgctatggagattgagaagaagaatctacgcgcggcagccttgagtgcaatggctttcctctgtgctggccccatcagcatcaccactgaaagtggttctgtcctccaattcgacgtcactcgcatgctttcatggattgaaatgatcttcaacactgtcagtgacaaatggcatgccatcggccgccgggctctgaagaacctcatcattcacaatcaggaacactcctatctgatggagcgatcaattgagatgtgctatgttaccgagcggcccaagaccattgagagctacttcgaagtggtgatgcaggtgctttttgaatatccggactatccactggaattctggagagttctaggagcagtcttggtgacactgggcaacgaaaaacgtgagatccgaatgaagtctgctaagcttctccgaaaacttgaggaacgccagcagaagaactccaggattcaagactttgatattagtatctcagacaagactaccgcagtgtacaagctggcccagttcgagatttcgaaaagattagctagtcagcattctgacttagcattcgctattttctcggagttttctttgcatttccgcgttcttggacctgatagccagcgaaatatggttgctgccatcctaccgtgggttcaaacgatggagctacaggttgacccgaatggcggccctacagccaagtcatacatgttgctcgcaaacctttttgagatcaccattcgttgcagttcagtcctgcctaaccaagtgcaagcactgtggcaggccttagcaacaggccctcacgggggtaatgtgcaactggtcctcgactttatcatcagcatctgtttggaacgcaaggagcaaaactttgtggattacgccaagcaaatggtcgtgttcttgtctgggactccagcaggatcaaaggtgatcgagttctttttgttgcaggttgtgccaaagaacatggtgcaagagcggaaagaactcactccacctcctcctgacatcgcaagtctgccatatgttgcagatcttggggtagtgctccctgtcggaaacaaacaagctggtctatcccttggacaggttgccctgatattcctcgttgatctgatggtcgctccggtgactctcgctctgagtgatgttgtcaagctgatccacatcgttctcatcctctgggatcattacacaatgactgtgcaggaacaagcccgtgagatgctggtacatcttatccacgaactgatagcggcgaaacttgaggacgatgccccggcgggtgcccggcaatcggtcgaagactttgtggaatcaatccgtaagagcgaccccgcggttgtttgggaatacgaagagaaccatagtaaagatgaagagatcgatgatcgccgggttcctgcatctatggctactgtcacccgtgaggtcgtcaggttctttagctttgcttacgaaggtgtcggcgatctgtgggccaaggaggcattgaactgggccacctcgtgtccagtacgacatttagcatgccgctccttccagattttccgctgtatctcgacatcattagattcgcggatgctagctgatatgctcgcccggctttcaaacaccattgcagacgaggaaacggattaccaaacattctcgatggagattcttactacgttgaagatcatcatcagctccctagcgccatcagatcttttggattatcctcagctcttctggacgacatgtgcttgtctcaacacaatccacgagactgagttcattgagagtattggcatgcttgagaaattcctcgaccgggtcgatctcagtgactcagttgtggtcgccaacctcatcgagggccagccaccaaactgggaaggcggctttgatggtatccaggaccttgtctttaagggaatgaaatcgtccgagtcctttgatcgtacgctcgatctgcttcatattcttagtggtcttccaaacaatgatctcatcggagatggaactcgacatctgtttactgtgttggctaacctgccccacttccttcaatgcttcaaggaagggttcaacgaccccaagcccatcgctcgtgccagcatacttgcccgcgtggctgagaatgagggatgccctcgcctcgcagcatctttgtttgggtttgccaatcagcagtacaagaccgccggggtcttcctcgaccatatcatcaccgagatcaagtcatactacttcccccagctggacttccagtgtctcatcttcctcatgggacttctcaccaacaccacggattggttccgcatcaaaaccatgaggatcctctgtgtgttgattcccgaggtggatatgcgacgcaatgaagtcacttgccatggcccagatctgatctccccactgctccggcttctgcaaaccgacctctgtcctcaggccctagaggttctggataatatcatcacggtctcggggaatccaatggagcgccaacatcttcggatgagtatggcgtcggcagcctcttctcgtgctatccgcaaagagtacgagcgaattcagagtctatacggaattcctgaaccgacgggatggtcggttcctatgcctgcaacccagtcaagcacgacccggcacaacgtccacgctgtcttctacacatgtgttgaagccgaagacaggcaagaggaagatgctaggacacctagcgtggccttccatgcggatgaatacagtgactcgttcttcccaatgagagctgatacgatgaaatcaatcgatacgcaggttgatggcaatatgggagatatcgtgcagaagctggacagcttagatgacttctttgaggatactgatacaatcactcctgtgctgaaccccatcgctcctccgatgctgcgaggattcactggtaactatgtggataccaacgcacatctgtatgatcagcagaccgcgccaattttgcgggaatcactcgctcggacaggttctacatcgtctttccataatggtcttgccgagtctcgccctcccaacatccgcttcgacggtccgggtgtgtactccccggtaacggcgataccccaaaacgcacagctactacgatccggttcccatacccgctctgtcacttcccctgccaacaacatgtatgcgcacacggcttccaatgcccccaattccacactgccggttgcattcggcgattccgctttactgtccgatgaggatccggacgaggtgcattcggacttagacgaacgcccggtaaccaagaagatgatcactccacctgcacccatgatccgcagtgcaactgatggaccacactccctggaatcaaggattcgcaacggcatgcggaggctgactggcggcgcagccaacagagaaaaagagcgacagcgggacctccttcgctcccaacaccgcgccattgtgcaaacggccaactcaccccgcgtccctaaggtacccgaggagtatctctcgggacctaccagtcacccggcatcaccgaggtgaggttggtacatatctttgcccttaacatacgtttctgctttgtcgtttcgctttttcttttctgttgtcagtccttttctaggctgcctgggcatttcttgggagtttggatcactttacatacataccccttactcgtccatctacttcgcgatcgatcttgtctatctagcgttgatccgcgcctctgcatcctgtacaatccatgtagtcagtcatatcctggaagttgatgggcttacatattaggtgtttgtcatttcaataccgaagtcaatacatttgaatttccaaggtcatgatgttgtcagagttcaagtttatgcgtctttatcaagaataccacgttgtatctatacattacgaagcgaagcgcagaacattaaggaggaccccctgccgagccgctataccgagaaaagttgccaactacgtccccgtgtatgcgaatgagttcctggcagttgaaacaaggtctgacaccctcttccatgtctctccacggagagaatcttggtattctgccgggcccaggtctttccactgcaaggaaatcccatacacgttgcggttttcttggaaaatatagcagtcacgaactactttttccgattcaggaaggaataacccatactaaatcatggagccgagcacccgtgttttcagtgactgtcgtcggctttctcccttcaagacagcaacgatttcaccgagcgtctccggtaaaagaatccgggccacttcttcagacatctggtagaccatgtagaatttcccactcgcctcaaaaaggacttccccccccctgagcatcgcacatgatagggatgcatttcccaagctcatatttagtagcgacatgatatccccaagaatctaccgctgcccattcaccctcgtagtcaagctcttccgggtccattgtccatcccggtggaggggacacctaggtacattatcagtatcacataatcgtgcgctcatctcagatgtttgacctacagaatattctctgcccaccatagcaatcggagtacggagtagtatggggggatctgcgtgatgtcaagccgggtgacccactcgagcggaatcttaattaccgccttcttaatggatgcaaccggcaattctgccaacatatcttccatggaatttatagtagaatcgaaattggcactttttcttatagcttcagggcaccaactaactgtggatgcgcacggggcatctttctcatgacaggcatttggagtacatcactgctcaatttgttattacctaggcagcactaaatcgagtacatacctagaggggaaaagtgactgtattatgtatatttttgggataattctaccctaagattggccatatcggtaagagtgactggaggtcgtcttaaacctaaaatttattgcttttcaagctatgaagatatactcattcacaattacgaggtctagatcggagaagcaaaggtccgtagtctttactggtccctcctttggagcccagaaagtcccttttgtcggggctggctggaattctgtctcaaagaagtcaatcttctctttatgtgccagagcaagatatcgacatttgtctcgtttttgtgggtcagcggaaactgtactggattggattcacaaatgatgcgtccggtagagcatgtagacttacccataagaagtttaattgggcagaacctcacttcatctttcacaatatctttcaggtctggttttctatagtgttgaagacctcgtcttcctttcgaccctcctcttttttcgggggatttgcatcaatatacaaagcccaacggagtacctttctaaatcaacgtcattcgcaggcatgcagaagaggttcatcgcctcagcactgaacggaattactacgccaaagaagatacgggatcggacattcataccgattaattgggaggcttgcatctaaaggagcgcgacactaaaacttgtgtcgcgctcattgccccacccaaacagctccagtgtccccactatccagtgtgtccttactatccagtgtgtccctactatctagtgtgtccctactctccagtgtgtcccctcctgcgggatcgtagacaatctataggttctactcctaagcctttgccttcttccatacgcggcattcttccatacggagatctcttccttatggggccttcttctatatgtagaattgatcattggaccgccaatctcagctatattctcgtaaagtaaattaaactattgggataatggttacataaaatctctgaccgaggataggaaaaacaaaggttctttcaggtaagagttccgcttcggtcttatgacttcatataggttgttgcggtgtatctttaccaacctgctgtacatcctggtctgtcactagcatcggggctggatagtaggagctcttgataggtcagtcatcttttcatcagagccatagtttgagacatactaattgtgagctgaggaaagcccagaatcccgaagtatccgctgataaaatatgtacctggcccgtctctcggatacgaattcccacgcacacatctgcgctgcacatcctactatattcgcatgcctttttcatcagacttgttttgcggcggcattgtttttgccgcatcaattttcttttcgaagtggtatccttggacttggtagccttgatagcggccattgggtgcgttgccttgatatctggaggtactttaacagtagagaagcctatataggtagcagggactctgaaaatttaggtccgctaatagaaaggggctcaatgaatataaatgttattgcacgaaggggagtctttaattatagagcgcgaaaagaccacgatattcaaagaccacgatattcttcaaattattgcacgcaaattggtcctttatatattgaactcataaaagtggccccgcaggacttgaagggcaatcaccagtgttatttgcggtcatcaaatgggtgcggcaacgggaaagcaaccgtaggcgcttatgtttacgtatcttgttcacattgcgcttttgcaccttgtaactattacgccaattccctatgtccggttaacaccgacggagtaaaaaattatcgattcataatctttatgataatggaatattcttaggggtctaaaatttcgggctatgaattttactatcacttgaattatatcaccttttaaaatttcgggctgtggattttacaatcacttgaattataccgcctcttaaaatttgcatgctgcaattttcctaaaggtcgaatattccgaacacaaaattttaaagggatcttttattcaggctcatttgaaattaccttcttaaagttcaagtcttattattttctcctcgattttatctacctgtctcggaaatttattatgtcccagttctaggaacgtcagaactactgcaaagggagagcgaaggtatacttgcaccatttccaaatagataatgtggggcctcgaactattcgagattcgcatatagcccggctggacagaatttttcagtcggaagggttttctcgcctgaacccagagaattatgtgaaggtccaatagcaatgatgttcttcagcaagctctgactgcccgatgaaactgaggccttcctaaacggcccattgaactttttaaaccccccaaatgaagtacggctgaatattgtgaacgatttatgttatatttgggcagttggactggaagcaaggctttttttggctggccctacaacggattatgcggatgaagagtcattagaatcttttctggcatggatcgacaaccaaagagccatgtgatactttctcagagaataagaaactgctacatagcagggcggtctatgtagaaactgctagataggagggaagtctatatagaaactgctacatagcagggcggtctatgtagaaactgctagataggagggaagtctatatagaaactgctacatagcagggcggtctatgtagaaactgctagataggagggaagtctatatagaaactgctacatagcagggcggtctatgtagaaactgctagataggagggaagtctatatagaaactgctacatagcagggcggtctatgtagaaactgctagataggagggaagtctatatagaaactgctacatagcagggcggtctatgtagaaactgctagataggagggaagtctatatagaaactgctacatagcagggcggtctatgtagaaactgctagataggagggaagtctatatagaaactgatagcactctagaagcgtagcgaattgccggggcatcctagaggcggtcggcagaatgcacaaaagagcccaatacagatagcgactacgaacataaacgcatttgagccttcgagcctttaatcagacacaagatataaataaacttccggcacagctttcaaatgacatataacactaagtaggaagctcgtgggcgttaagccgagttgtggtgtctaagcatgaggaagagaagctcgcgaccaatggtccacttgtaaaggagaagaaccttctatggatagcatcctaggtactcatgagatacccatttcaggacacgcatagacctatgctgcttgtaccaagagcatgatacagacaagacgtatggtgccccgaaagaattctaacagaagtggtgctgggatgaaagacagatcttgtatctatgatggagctatgtagagtatcctgtagggtgtgaaataagaggacgttaatgaaacaccactgctagttggaccatttcaagagcaaggtttccttggaaggccgagaacaaaagacttctttcgagagggttcaggtcatgggagaatcctcttgagaggaaataagtcacagtacggctaactgaagagcacatacgacacagaagggtaaacgtcatatgagctgggtcttcatgctatttctctcctaatccaattgttctgggcttgggctggttttgagatggtctagggcgaccacgaattgcggatggcggtttagccagacgccgttcagtgaggattgcgttcattggcttattatcttgctgtaggagcgggtctctgcagtagctttcattggacgacagtgtatgctgcggatgctagacccgcgttctcgtttcagagcctcagtgggcgcttatatacagccactgaaaccgtcccacgacgaagaaggcggtatcaaagggtgttttttttggcccgctctctgacttgactcgttatctcagtcaccccaccttctacttcccgctaaacgttggtacatacgcacagccgaatagcgggcaggaagatggaaagctgcttgcttcagttcgtgggggatcctgaaacggcgcccagaaatgaagttgtttggagactcatcaccagactcgatggagccgcctacgaaccgcctattcatttgtgggcaaagtgcaatccacccttcgtctcaacaccctgtatgattatgtctgctcccccccttcagacccattaagcctctaataacaactaacaaagaagcagtagttgatcaatttcaaaatgaagcatcaaaacaagatacgaagacagtccactgcctgcaaagaatgtcagcgtcggcggacaaaggtagggaatattacaatagtatagatcttctacttacttttcgttaaaatagtgcagtggtggaaatccgtgctcggaatgcacaaaacgcgactgtgtctgcgatgtcgatgagaactctgataaacgacgcaaactctacttaggtataatggaagaacttaggtaccatcaacaatttatggacgggttttttgaggcaatacggacttctgatgatgctaatgtccaccacattatcgatgttgtgcggtcgggatcattgaccagtgagatacagactgcagtgaatcgcattcttacggataatcgttcttcctacaatgacgtccctgaaggaggtccgttaagtgaccggcccaagaggaaggcttctaaatcggctacgtcggattatctcatagcccagctgctggatccaagcgaaattcaaagtgatggcgactcagcccagcaacctgttccgtaccccacgagctatcgcgtgctaccaaggaatatctcgagaagtctgagaatacagaaatgctttgcgaatgaggagcttccagatgatgttcgctttcagatgttttacgacgccggatatgttacgcgctactttggcgctattcatctaaaagaacagtcacctcaactgcaactggaggcatccttgctacataagatggcgttccggcgccatgcttttgatgtgcatcatgtgtgcagtcagtcgctggcgttgctcgaattcggtgtaggaacttcaaagacaagaataagcaggccatggtctcctgagcggcagtcaagtagggagatccggataaatataggtatacactgtcggcctcgttacgacactacttgatgcctaaccaattaaaaattggcatgaagcagactttcggggaatctcagtcataatatataattatccactgcagagatgctttcggagtcggctagcgttcgaatgcttcttcgcacagaaagggcatactcgcatgcaggaagcgattctgatctctgcattttccttgggccaatgctggtagtctttccgatgcgcaacacaatcgcaagcagggtgtatatctgtcgtattttccatgtggctgtcacgactgagaaggactgggaatgattggggacgattgaggacgattggggacgattggggacgattgagataatggctctaaagagcagttcatgcgataaattttaatctagtaggtgttaattagcaatatcgatgataagaagctaataaaagcacaaacggcttcgttcacaccgcgtatttgcgcaaactatcgcgtctatatgcagggatgcaggagagcagtgcttctccgcctaccctattaggttagattgtatttttcctatctgtgctgtagtcaggatacagtcactacgcaaaagtgttagcaccccagattctgccagtaaatattcaccaataaagggctaaggataatagacggaatatcaatttaaggaggcagtataataaattaggaaggcggtagtagaaggggtgttaatacttctgcggagtcactgtaggttaagaatccagacaagtgttccgcttccgaagatccacccccattagttgcccacgcatgctcgaattatgtgtgacttgataatccttgtagaccgttagatacgacacagcacaggactacacaacaattcacagaataacttcgaaaaagatggaatacaatttatgcgatagggcactttgaacattctgatttaacgtgctatgaaatatctggagtctctaatgtgaccctcacataaaatgtagtcaatggtacaaaatgtgcctttgtcgctgaaaggacaccatcggatggttgaaccgcctgaagagttctcaccgaaaccttccaccccagacgcaacttctttctatgccctttgtggattagtttccacttaaaggtagacatttgagtcatgactggccaattagtgaagaacaagttatcataaatacgcctagctacgtgtagagtaaggttctgggtaactaaatgcttccaagggcatcactggccagccaacaacctcaatctccacatcagtctgccacatgtggccgaacccttcatgattcagattgctttcaccaaagccaagagctcgccaaagcttgatgcgaaatatgaaacagtcagtcccaaactcgtcgaggtcataccagcgatcatctgcagagtccgcagttgatgtgtttgtctgcgggtcctccgctacaaagtcaggactagaaatgtcattcgattcgtcagtcatgtcattcgattcgtcagtcatgtcatgcgattcgtccgtcatgtcatccaattcgtcaggcaactcgtctgattcatcatgaacgtcgttatcctctggcaaacttccatacatattctcatccccagtatacaatcccatacaatagatatctgccgtgcatgggagagtctgaagctttgggaatactcttcgccactcggtgacaaaatcttgcatttggtctgactgcattagtacccttggttgatcgaaccagacgcttctgaggcacatgattttcaagttggatagtggacgcgcttgatgcatcagcaaaagagaaaggaacaatcgagcctccggcaagttcaaagaaacgagacgtggacagtaatgcgcgagatcaggaagcattgcaccattcattcgatacctgagccccaacgtaagcaattccacattgggtaatgcacgtaagagacctaggaactggggctgagagaggttttggtcccccatcctggcagatttatcatacacttcaaactttcgtaatagcgggcaacctcgcgcaatcttgagtagtgcttcagcatccgctagggcctcaaaggtcacgtcaacaatctgcaagtgacgacatttcgaaatcattctgattgcctgtccattgtgggcaggagagatatggtgcaaacagattatctgaagtttttcaaatctgggcaaatattctaaccaattttcatgcccccgtctaaggtggagtactttcaaatctggccatgggttttgagccagagatatcgatgcttgacttggatcgcagaaagttgtcctaagtgccagtgtttcgaggctcttctggtactgaaggtatggtaaaacttccccgagacttgattggacgggattgtttagccctcttggttcttcaaattggaagaaatgtaaattgcagtgtttcaggaggacacaaagctcattgaccgtttgatcaaaatcagacttataaattgtgagagccatgacattggcaaatttgttctattatggtggtaagtcatctttcaaagagctaatagggcgtgcaaaccaacatcaagtagggcattggagtgagccatcaaattcttgcagtaaatgttgtcaatagccaagtactccacagtgggggaaagaagaacatcagatatggatgaccaatcttgatctatgatctcgtatggaattataagactctgaaaacctcttccctgtggccgcaagagaagttctgtagattgccgatgacgcagcatgcgaggcttttcaaaggatgcaagtcgagtaggattcgcagcttcatccaacgccggtgtttctggcgcaagtaaaagatgtttgacaaagctaatattccgggcgaagcgggttcgcgacgctacatacaagctattcagtgatccaataccaggtgtacggagctgcatatcattgatggagcccgagtatagtttcttgagagcttctgcactccagacgctattgacacaagcacagttcaggagatctggagccgtgtgaacattgtcgatgacgagtgacatgatttctgggaggaggaaaggattatttacactgctttgaaggcatgcagccatggcgtatccataaaacgaaaaggaacggaacttaaaacgataaatgaaggttctcactcggtttgaaacaagaacgggacgtccccgaagataacatcacggtgtgaatccggcgctaactaaggaatattgatgactaaccttgtcaaagcggggttgcactagcctaggacccagccaaaacctttacgatgtcgacagcataacctcgtgcggagtccgacgcttaactacaccgatccagggtcgtgaacttagtatctagttgaccagggcccaaatattttaatctgtgataaaaaaaggtcgcgagcttaaaaattgtacgtacagtagcatcgccagttcacatatttgttaagatcagtgattggctggttgttttattgttgttggttgacttaatgagtcccctccactactcacccgccagaaccaggcgctttcccttccccgtgcgcatttgctgaaatccgatttacaccgaagccatttacccccctcatcaactttcaaggcgtggaaaaattctagcaaagtgacattcattcaatatctctcttagccatcaatcgatgagcgttattacccctgccaagatctcatcagcaatcccgcccgccataaatggaatcaacttatggcgtttgagatcccattccagaatctgacatacagtatccttgtggagagaatactggcatttaagtcgcctcaatggtatatgttgaattcatcatcgcgatactatcctgggtacgatacttctccccacctttgttacaatgcatctttttctttggtctttgcaacgctcaacaaattcctaggatactgtgtaaagctcaaaagcacctgcgaaacgatgtatttcgtaggggctaggaacaaagtaaaatgcaaggccattatttgatggccccacacatgaagaccccaggcgagacaatgtcctttggagtgaggagctcgggcgtgctctaatcatcgactttcaccgttctaccctgacatgtcgaccggctaggcagcgaccgggggccgcaaaacgacgactatatcaagtggaggcaggagatgcaaagcgtcttcgggtttcgtgataagaaaatctattttctacctgttaaattagcgattttgtgactcaaattctcatggtcacctatatatttcgaggcgaggtgcgctccttattcatgtgcatcaacaccacccgacttattatgtgagccggaccctcgaacttgagaactttttggaatgatatgaccattataagagcatagcagactgtcattcaattctgatattgcgacaaatgcaacagctgactgtataattgagggccgtttaagaggcccactgggagccaatctcaacactgcttttgccagcacaggtccacagaactgatatctctcataaatatggaagttattgcagtccagcattggccgcatgatgtaggatcgaccgaggtcaggcgagtgtggggtattttcgctattggctcgcatcgccgtggtattctttcaagattcacagattgggtgcggagagaccggagaggccaacgatgtcgacagatgggaggtcgaggcattcgcgaacaagcggccgagagtagatctggcacgccaagggctgtgcaatgaaacctctggtggggcctgagatggggcggatgaagcggagcattcaccaacaaggagaacaatttgggagacttcgcaacaagcaagggaggtcagcggaataacagacacccaacgggaaggcctcaccagcagaaagaaagcggtctagatgtctttgtagagttctttggaaaatggagtattgacacacaattatgcgatgcggtggatggctagatcaccccagtatttctactcctaagcaactgaatagcattacagcccacgctggtcagaacgaccagggagtcggatcgatctgcatctccggtaaactgaaaggggcagtgcgtcgggctgaaagcaaatgtgcagtagtcggtgggggccagagtaaaagaaagggggcggcgatgagtgcaagatagagaggtaggaagaatgaaaaagtgagagtaagggaggaggaccagtgaagacgggtctttatgtcaaagagcattgaagggaggttatgtgatggcgtattgaggcactaagcctaaaaaggcaaaactaaccggatagagtaattcacgggtccgccgtttacatgcaaaaaatgcattaattatgaagtcacggggaactggcatgtttgcactgtttatcaaagaatgggcccccaatgggcccccacgatgggccgtgggcccaaaaaaaaagcccaaagcccatcgtgggcccaagaaccgggcccaaagcccagcccattcgtgggttgggctgggttgggctttgggctttgtgggttctgcggaagcctatactatagatctctatactagcagcttattagctaaaaacactattactagtaccttttcaccggattccttgtctctataaaaaggaatcgcttctttctctcctctctaggaaagatttcctaacaattgagtatatcttcgcgaaactacctctatttcttaatcaggatattacctgatattatatgctctactatatagtctattttactccggcctactagaccactctttactcgttctctaggccctagatactttatatattttacccttttgcctgtcttttacctgttaacttaatgatagagtgctatatttttttatattattactagctttataggaagctctttcgaaagagatagatgatctcatgaagggtattggaaggtaagtcctgttattggtgggtcacgtgacctgtctactatttttagatacttgcccatctatagcttctcttcttcttcccttctctctttacacatatatacaattcctgtatagcctcattacgttccagtaagaccttctaagacagtgtcatcatctcgctccatagatgcaatttaatcttcaagtagattgtctaaagctgacacggttctttcaagctgacgacctgcttagcgattgactattgtattatacgtttgttagatcgcttttagagatcatatcgtaagaaatctaacgggatcccttcttttatctattatacgggcgaaaatcacggacgaaaacacctattaagtcttaggatcagactaaatgttaagatatataataccggtccgatattgcccagcttcatgctaccggcgatccttaacgatgccgggctcgggagtccttcagggcttcatatccgctgactcatcgggttctgactaagcggaccctgatcaaacttaattgaaacatttttaattaaaatctctcagggatcttccaaagtgaccgagtagacacagccggaagggatgaaggatccgtcgatttggctcaagctaaacaaccaagtttcacaccaattccaatgaatatctatagatccacattggtctcatttttttcaaaaatgccatgtaacaattcatgaatgtcgtataagaatatataagtgaccggctgaaaattttctggatccattccttgacttcgttctaaagttttaatattggaaaattccgtatctatatatgatgtctgtgtgagccatggtgatgactgtgactccgcttcgcagtgacaaattcaggctctgtactatcatcatcatgcgccaagccgatctcgttgagttgatcggccatctccttgaacggactatcttcctcgaagggatcgtcgctaagtgtgacatctgagtcgaggacagtatttgttagtcatgtctcatcaatcaattggttttgatcaacttacttgtaaccacccagttgtcagggtcattagggtccaaacctctggctgcgatggtagccgggggttcgaattggatcttgcagggcttgttttccagcatatcgaccttaagcgcaccaggggccttcttcttgtaagggtacacgaggcagatgccgttgttggtcagtgaaagttcagggtttccctggaggttgataccacccaaaacatggaggagtcctgtccctgggttcatggaaggattgttcgtggcacctgaggaaaatataccacctactgtcccgaggttgttctgggtgttcgtgtagctgaaaaggttcatggtgtagtatcttgtcggccctgtccatgacgagtccttccagtatttcgatgcggtttggcccgttggctgattaattagtaaacatttgatagatgctgccaggtacaaaaattttgactcacggtgtacttgatgtaagaaagttggccattgatcttagcttgatacttctgctgaccgtccggaacacatgcgacctcctaaaggacatcagattagttttcacgcaacaagtttcaaagagaataagatcagcttacagcgcctgtgcccccctctgctgctgagttgactggacgagtgtcgtgtcagtagatggccttgaatcaagtggatccagagtgcaatgttgacatacagggaaactcatcacaggacatggtcagcgcctggggctgttttccatccttgggccaaagggacctcttcaacttcgtacattccttcgatttctgagtacatgcgtcgacccggttagcatgcgttggatccggctgataggtcaggcgcatccaattgggccaaacatattgcttgcccgagttccggtccaggtatttcttgacattttcgcaaatgcccctgagatcgacgtgaggagtttgtccatttgtgtcagtgttgaggttgttgattctcgttgttgggaaccagtcacagttgtaaaacaacgccggtgggaggtagcaagttggtgcggtgttagcacgcttagcagttgacgaggtgtcttctgtatccaagcaactcaaggtttcgttagtaagttgagtattcttgttggcacattgacaccatccactaaagaaaggtgagccagttgtgtttttgaccagagccgagcttgttgaatcacgcttcctcttttcatccacatcactcgagtaagctagacattttttgtcaacaagtgcgatgggatcttctggagaggcgatctcatatcgatcaccccagtatgccacgtcgccaaggaatctgaggatttatcagttagcactgaccgggataaccaaaagccttcaagtagatataacttacgaggcatctgcttgcagaaataccgaataatcgtagtctgcccagtagcagaattctgcagaagacccgctcgatagacctgtcgacgccgaagcactaacacccaaactgacagtgttctcgactcccgcggtaaaatagccttccattaactttccattcagaacagaaataccgaatttgacctcaggggtaagagtcaaagccaagttgcccgatgccgacgctgaagcttcgaactgaggtgtgacggagaattgattcggggcatccttgccatcctcgtttttgagagaagacgggggaacactggcatcctcaccatctgaatcttgtgggaagaacacttctgctttagggaattccacaacaacaccagcgttaagttcacctgaaaccaccatcgaggcatccattttaccggaaagggcgagctctgggccgatgctgataagtcccttgatggaaagcccagggaatgtcacaccggagataatatcgatcttgtcgctgctggtctggaatgctgcttctcctcgcatggtcagaagaatctctgctgcaggagcaaccgaaaagtatgcataagaagaaatcaacttgggagtgggcaaaatcgcgccttcaaagtagtacgcgtattgcgcattgagacctatatcgagagtagaatcgatgtccagtgacatttgtttgccgctgcacttctcatcccaatggaacaacttgatcgtgtcatagtagttcagaggtaggtatccagagctgtttttgacaattgtggtgactttcttcagccattgcttgaaggcgccaaaccatctcttcctcttctggggtggatcctccgtaatatcctccctaacgacgatgaataatgttagtcgcgactaattttttttgacagtgagtcaccagtcatagcttaccagtagtcaagcaaattcgtatagtcgacccgaaagttgacgtctcccttctcctcctccgaagcggaagccaggtcataatccacagtgagttcatacgcctggtttgtgtcccgcggtaggatattactccgcttctctgaagagtgctgtggaaccaagctgatgacacgagcgtagggtccagatccgtggtaagaaggcatcttgacaatggtgtttgatgcaccaccggagaaaatggtcttacacccggtatcttcatcgaggctcgcacagcgaataatgtaagtctcaacgacgttgtcaaacgtgtcctcgcggaatgtgaagatgtctcgcttcttgcgtggaccgccatctctcttggagttgagacctccatcttccaaaaatgtccactgatccacaagagactcgtcgtatgcatccgtgtcaccatccaccatcacaaatgcgtaagggttctcttgctcgaagtcggatgattcgttgttgtcggtgtcctcgtgcttcaggtaatagctgtagtttttctcatctgggtactcaaatatggcggaggggtcgacgggagggttgacagttgaagtaggtgcatcacagcaaaacttgtacatgcctccttcatggcaatattgggggagactgccatttagtaaagctgagcgttgggtgaggagaactttgtcactagcgcaagactcggtacaagtagtccattcacaattctcgtaaccatcttgattcgtgaggtcccattagcggagttgctgcgaatgaggtgccataacttactgtcaaatgggcagcaaaaggtcgaaacctcacttccagagcagtactcagagtcttcgttgagatctaaaattctgtcagacgttcacattcctcttcaacgtggactcggggggaggtaagggggtgtgatggtgaggtgtgaagtgacttactagtgccgggcttgagagcatattccgggtactcaatatcagttttcatgcattctccgttgcaggcggtccagaaacacgagttcactatagtgtcaagattggggtcggtggcacagcaaagcgatcgactattgaccatgcacggggtagaccctgtccggtcagagtaagagtccttgacaatttcaaattcatttgagccacatgttttctcctttccaccagtacacatgccatcggatgagccgccagtccactggcatgtcggcattgcatctgttgggcaacagatcagacgatattctgagtctgaatcctcatattcggtcgtatcgccagttttgcaaagatgatcatcggggtcaatgatggttccgtaagaggctctgtgaacgtaatccaaaacactgtaacccgctttacatgatccagagttatagtccacgcatccagtgacataacaatcagtaccagtatattgattgtatgcatgtgctaatgccttggcactcagtgagttctcagatcctccttctagcagggaagcggagctgacatctttgttcagcagggcagttaaagcttgccagtcgtatgtatcctgatccaaggcccagatcatgactccgcctaggcattgatcattggcccaatcgaccttctgcttcattgtgacattgttgtcgtacgatacccactggttgtcgtcccaggtgacatacatgactgctgcagtttcctcccagatgggaccctggacatcaacattctcgacgatctccatgatctcattatatgagagaatcccagaagcatctgtacatcgaccaggctgccctcctccagtgaaggggcatccgacgccagtgcatgaagagtccttgagtgtgaaagatcgaccatagaaaccaatgcccaaaacaatctttgatggatcaacattgtttcgccaaagaaggtccatggattgttgaatctctgtcaagtttgtgtgcgctccagtgatattcccaatgtatgggtctgtgccatcccagacaccgtgaagatcgtaggtcatcatgttcgcccagtcggctccgtcttcttgcaaataggcgggcacgtcaaagtggcggagataccagtagctcgatggaatggtgaatgagattccaaggcttgaaccactgtcgtcaaaggttgagcgaacttgcttgatcaacttgccgtagttttccatgtcatccttgctgccaccacgatccgaagcgacaggatactcccagtccaagtcaacaccgtcaaagccgtattgctgcaacgtccgcaataagtctttggcgaatgactttcggccagattcagtagatgccatgtcagaccaatagtgcgccgaatcaccgtcattgaatgaccagccgccaacagacaagaagcacttcaaggacgggttgtcatctttcaaagcaatgaaatcagccaccatgtcattcaagttcgatatcttgtcctcatccatcaggtaaacattccagccatcattccagggtttgaaaagagcaaacgaccaatagatgtgtgtcaggctctgcacggggagattgcttggagaccatgaatcacatgtccgttcagcagaccagctctcataatagccaatgaccttcttgagaacgtcgttcgatttgcaggaaggctgcgttggttgatagcaattgctttggcacttgccgccgtctgtaccggcgttgcaaaactcggatgttgtaccgcagaaaccgaactcggagcagcaaacattcaatgggcaggtcgtgccagcagtggcagcccatttgccgcattctgcagttgcattgcagttgctcacgcatgtagagccacaagatttgtcgggatcatagccacaaagctgtatactttgggtcagcgaggcttaatggataagatagacaggcttaactaacgccattggtttcaccatcgttcacaccacagcatgcaccgttgacacatggacttgtcaagttgcagacatagaactgggccgatgtgaaatttataaagagtgaaagtataataaaagaaagtagaaagaaagaatggcaggacaagaactccgcccgcaaactgtatatcctcatggtgcggctctttcgtccgaaatactgaacaagtcagtaaaagcttgcccaggacgattcaagtcaaaggagaaagagaatgaatgagaaaagtaagaggaactaggatcataaagataacagacggggtccgaaatgaacagccgagactacctaagctcgcaacagtccggcagcctcaagtatccgacgctgatacagttcagtttggagtcccacaagtgtatctactaatctaatctactaatttaatccctcagcgcacgcaatactatttgtggactagacttgcaatttttactaggctagtcgtatctcgtgagaaaccgaatcccttcagagtttggaatggtcaatgtataccctgcataaccccaccggtgtactgtactagtatctcctatgggtgccgaatacatccggaccacctggtggcgccttaagttggccccctggttccaagcctcctgttacactacttcgtagcttcaaatcttgtaagcaatcacttcaaaaattttcatcggcggggcaaggcccggaagtttcagctgtgcagctcgcttagaacaaagcctgcattcaatggtttgtgcaatctctacagaatgcatccgatgtgaaaggtatactgttaattcctacattttacttggcattagagccgcatctgcatcctagcaagccaagctatagccaagaatgtaagcttcagccattgatctgtttgtctacaattcttttctatcgtctaagtccattattcttggcggacccatgtgaaaattttggcccccttggcccccaacatggggccctctaacacgttcaggggatctcggcccctacccgctaagtgggactggcttcgggacttgatgtatagggtaaagcttcacccacttttccacttgaatgggctgtctagtgctcaagccgaaccactttttcctgtacctcgcttagtggatttcgacggatgtctcagatttagcttggtactttgaacttccaatgggcctccccacttctagctccttttgataaggtggtaaattggttggtatgaaggcgtcaatacgaaacaccgaagtttccctgccgaacaagtagtttgagtagccattactccccctcctttgggattgctcatgtcccaggttcaaggaaaatcaattcgcgctctgaattctctttcagtcatagagctatggcactcttgagggcaagtgctgcattggcagtagttctgatgctacagtctcatcatgccgctgcttggggaaattcagacactctctacatttacaactctgatactctggctgatatatcagcttcagaagcatgcgtgaatgccatgtccagcaatgtttcatgctatgccggcttgagccaggcagtcacccagacgacatcatggtcagccaatgcactgtcggaaatgtgtaccagcggttgctcttccgctttgtcaagctatgtctcctctgtggacgaagcctgcggcacaagtacgcagtacaacatctccggtatctcacaaactgcctcggatagaggcaaagaaatgaaatggcgttacgatgcaacctgcttgactgattcggcttcgggcacctattgcaacaccctattccaaaatgcaatttcgaatggcacaacaaacatcaaatgcagcgcatgctatttggagtatttgtcaaccctagtgaattccaaatggggtcaggatattttgctcagtccgtcggccttaacgagtcaagtatcttcttgctcgaccagcggatactctgtgacttatacacgaacctcgactgcctcttccacggcctctgcctcggccactgttgccgctagtcgctgcaacacgactgaccccgatcaaactgtttacaaggttgaatccggagatacctgtctttctatctcagcagctcaaaatgtctcaacctcagccttgataaacttgaacagccttgatacggggtgtacgcatatagttgctggggcagagatttgccttcccgatgtttgtgagatctatcgcgttcaggagacggataccattgacaaaatcgttgcgagcctatcgcgtcaagtctctgtgcctcagtttgttgcatggaatgccaatctcaactcagcgcaaagctcgcagaatctgacggctgtttcggggaagtacatctgcgtcagtcctccgggtactctcacactccccgataccctggctcttaggcccgcaagcaccgctgtgtatgttgtctgctattttgtttcgctcggttgttcggaaagtgaaaatgctaatcaaatatacaggtctcttcctaccgacgcagtcgctagctccaacaccgactgtggtcactggtatcaggtccaagatggtgatacctgtgaatccgtgtgcgacaaattcagcatctctcaatataatttcaatttcttaaatccccaggccgcattgaatgcaacctccagttgcggcagcctctggaaagggaacagctacgtacgtctctctacacgagaaaataaccaagacatatcgttcttttcaggctaacccatccactccacagtgcgttcaagcagtgggtaacatcaacacctatacaagctacatatccaacaccacaagaacacgcacatcacttgctagcaccatgaatctcaacgcaacccgaacagcaaaccatagcaccaccaatctgttctggtcattcccttccgacctaaccacggcctcaacctggacccctgattcagcatacctcgcatctctcgcgacctacactctctgcgaccaggtcaactcagtgtacaacatcaccgatgacgatctaacagacgagatgtaccacgatgaagtctggctaagtgaatacgagcgcgtgtgctatcctcccgtgaacggttctttcccgaccaccgggttcaacttcagcattacattgaccgatgatccaagtatgggaagctcgacggtattcacttctagccaaacagctagccctcacgcatcatctacggtcactacggcgacctctaccacagttgcgactcctacgagtacgatttcggagaacggtctctgtggcccgtctaattcggactggacttgtttgggatctcaatttggtgactgctgtagtaactacggttattgtggtagttcgtcggagtattgttccagcgccaattgtaatgctaagtatggctcgtgtggttgatcttggtttgggggtgggacactcaatgccctagagttctaaagttcactgtcggacaaaattcggctatggtcttcaaggcatgtcaaatgtttatatatgccatattttcttctagttttaattactggaatatagaactgggatttaccagctggctgttaactggcacatagtagtgcatggaaacctggaatttatgaatatcaaactttcgcttacatttcaatgattttggcacaaatttacaactttacaaccagaattttgaaagcaagcggctaggccggaaaagacgctacttagtgcacaccaagtttgtgatcgatccacttcaacgaaaaccctttaagccaaagacccactccaggggtgtatatccgagctcgcaaccacttaatctcccctatcaaagcttagtcgtaaagattccaaggtcgcataatacaggtttagtgtgtttgagatgagtttgtacaggaacttttgaaaatataactagatttgatgccttagtgcaaacttggggcgggcatgtatcaaactccgttaaatacattcccgccccccacgttcctcactaaacttcttttcaacccccggaactaccaccattcgatcatgtccttaacaagatcacatagccagtggcctagaggcatcccctctttcattcgccgacatgaggaacccgtggcccggaagaattttgatgccgcctctcgtgcatggaggcattttgttcgtgagcagtgggtcggtggcgacggcgcggatcaacagaaacgagcgttgatcgaacgctgggcaacagcagaccaacaattccgcgatgtatgtcttttggataagaatttttatttttcactgacaccatgacagagctatcaatcacgagccccagaggacgagcctagtttttttgaaggtcctgaacttgcggtatgaaacaattaaatatatcctactacctgacttatcctaatccaagtataggataaaactttcggagccaatgacgttcaaagttcctgcatggtctacttctacaccaccgaattaacccccgagaaagaagccctgctcgccaagtgtatcctgggattattcccatgggaagacggctgggactttctagcagacgaaatgatagtatttgttccccctgaagacaataaggggaatgttctcgagacatttaaattccatcaaagtgtcgcgcgacccaacttcctcgatatgcacatggcgcttgatggaactgtacttttcagagactgctcccccaagcttattatcgatgaccggacccttgagaccggactaggtctctgggttgattttacaaccaacggtatctacgagatagcccgtcggggtcaaattatgatggaggaattcgcctacttttatcgggaaatcggtccgggaaatcgagtcccaatagaccaggcgctcaattacattgaggaccgggaaatttacatagaccgcgacgaagatgcagatccaagagagattttggaggatgaaccgtgagtctgtccattcttggttacgagatggtttatgttaattggtgcttagagtcgatatgcgacggccgcttgtggaaatctacaaagggaatgaagtcgatctggtggatgactatgcgccaggatttcgcgaggcggaggagcagggtgacggtttagcgatcggatttgatttggaaaggatacttgcgaacgatggaaatcccctgattgtcagagatcatggaagtgaccattagctagactttaccatgtactcctgaagtctcgttggttatttatatgggagatacggagtacataactggcaaccaccccttacctccggcagggatggagatctctaccgaatataccttgcccacggagcctccccaaagaatcaataattgggcacttgctgcaggtacccgtggactacagctacagtacggggtacggagtacattctcataccccggagcgattgataacatactaggtactatttatattgtaatatttcagctttttataggtagctgtaaactatttattatatttaaggtatatcatagtctgtttgttaggctggtaaagcttctgatattgaaggtccaagaaatgacgatattaatgataaggagaggaaggaggaagaagaagaagaagctatgaaagaagtaagctaaacagcaaggcaaacaaaacaagcaaagtgagcaaagcgagcaaagcaagcaaacagggcgcggggcagcaagcaagtaaacaaacgaatatataatgcttatagagcatgatactaccccctaataaagtaaaggtattagtcccttgatatcaaaataaccaaatcaattaatgatagtatgaattatcagaatcactcccttccaaatcaaccaatttagggtcaggaacaatagtagcattagtagtagtggcactaagagagatatctattacgtcagatctaccaccagagttactagttttactattttaactataggatataaagacgagatagaacttaatatttttaatactttattaggtaaaaagactatatatattctttagtatattctatatcgattataactataaagagatagcttttaataacgataaatagcgctagatcgactaacgtattcggtaagcgagctgcgcgcgcaaccgagctgcgcagcccaaaacacatagtaaatgcaagatattccacatttatatcttaacaaccatatgttcatcctatctccccgtttgtcgatagttattgataagacttcttagtactatatatcaatttcaaagagagtagaatactatcttaccatgatttcaaatattaccgaaaattacgtccctaaaagctagaaatatatatatcgtagttataaagccatttattttcctaaagttccctagatatactagatatcatatatatagtactatgctataaagacaagtccctatgagccactgttgttgagatatcaagttgtaatatatcgtatttactatgtgttttgggctgcgcagctcggttgcgcgcgcagctcacttaccgaatacgttagtcgatctagcgctatttatcgttattaaaagctatctctttatagttataatcgatatagaatatttatcttctttatcttataaagctattctataattatatacttactcttttaaagactcgagatataactatatatcttattttctagatctataatatattatttaagtatctagagaagtctattaattagctttaataaaagtatatactatagaaataataaatactttcctctcttaaggctagccgattaaagcttaataagtattatttataaataaattataagtatagttatatttatataattagtactatattagcgctagatagtcgattctaattctttctaaccgataattagataaaagaatagtataagatatatcgagctttattctaagatactcttaccccttactaagatcgttaagtaactagttaaggcctattagcctcttcttttagattaagactaaatatagttcttaataatctactttacgtaaagaaacctaaagcgaagccggttagggataagataacctaatatcttaatagtagtaagttaatcttattctaataattacttattacagagtacacaaagccgccctcaatgcttatattgaaacagatggctacggaggacgttgtatacagcgaaaggtcgacaggcgcgaaccaagaaatatcccgacagcatagcctctctcattggcgtttcttcggtcttccagaccgagagctggccttgtggcgtaatttggttgaatagtgaacttgaagggatgacatgtttcgacctgggaagtgagtcgtaatctcagactatgacattgcctctttttccttcagccgcacgagcagcgcattctcgtccgacgtgtatgtgtgtttccctgggataaccgccgtgtgcgctcgagacagcatcgggctaggatcgggtacgaaagtaaagaaatatgccggtttcagaccagtattagattcgaccgtgaggatagcactcccgcgtacaccctggatagcaccagagcaatgagatgaaataggaacggaagattccgaagggtcgaaaagtggcctgattgaaggtctccttttcttcctcttttgacacggctgtgctgtgtcataggtggtgttctcgtcttggtggtcgccggtgcctggacttgagcggagtcgcttcttgcatactgccgcagcggcccttgtgcttgtcctggcggctccttgtttccaggacgttgacggtataaccacagctatcgacgggtagcgcaccgggggttcggaactaagcatcgttcgagctcgagaacattttaatgtagagcgagccgtcagcggggaggacggcctagatgtggctggcgtgtcttcaatagtgctaggatcttcagcccgctcagaagccttgtttgcccttgagtatggatcttcacctaggttagatgtctgactcggctccgaatcactttcgtagaccccactatctgagggctccatggtagataacttccgcttggctaattcttgccgaaaatcacccaccacagataggttgctagagacacagttcgcttattcgggtacaggcacggatggggtcacacagggtatgcaagagagttgagaagtctccatttctttggtatcaggaacagcgtctacaataaaaaaaagtcagacaatgagaggatgatggccgactttcaatatattgtgccaaattacccggtagaacatctcctcgcatatcaggaggaatagtatctaggtaatttggccctacaggacatagaattgttctcgcggagtctgtcgatagcactggctctaagaaagccagcgcggaacttccacgatccaacagaatatcacaggcagctggtatatctgttgtcactgggggtccgacatctttcgtcatttcaggcggagtgggtccgtagacatgattgatctcgaagtcaaacatgttccactcataagttgtaccggtcagtggcagtgactgtcctaggggtacctcacacggtcctagacagaagccgaacccagtaggaaaagactgctagaggtatcgtggctcatgagctggggcgtggttagggggcacgctttttgcactggtagaaagcggcgggcgacttgggccatggtagaactcgatttgatcaagatccaccctcatttcccagaaagtggtaagacacagcctagacacagcggaggtagaaaccaacagagaatgaagcaagcttaaataagagtacagcggtcactgggctagtgtatccacatccgttctaaatgatatccaaatcccttgatggatcaaagcttcaagactttcctagtcgataaatatgcgtatttagataattggaagcaccaattacaaaggcggttcaaattgcttgtttgattgggctttaggagcggggaaactagttgtacatgttatatttatgaaagcttctagctctcaatcaatgcatggaggatttgatttccagcgagaaaatgacaggcatggtttttccatcctaaagtttgttatttccagtagtgttaaggtatccccaatagactcctacgttattgtgcacactaaagataaagatcgcttccctaccatatacccatttatgatattatcatgccaaaaaacgccagatccagtagtgatataccaaagggaaagagaaatcgttggtgtctatggcaggggtagcccaagagcttgcaaaggtaagcaggagacagtcccatgcactctttctgcatggttcaggagtgccttttttgattctagatcttctccgcaaatattacacttgcagtgcatatcattcgggaacagcttgatatgcctattgacaaagtatcgattgagagaaccagggttcttatacattctcagacgctcattttcgggcagcccagaattaccaagacagataaagcagatcgttggtcgagacttttcagttttaacgcagacagaagcgatagcttgagaaaaagtatcgtctctattttctggaagagcagaattctgcctcttaggcatgggggcagcagcggctatgttacgaccccgagggtcacttgcacaactggcccgtatgggccgacgtacttgctaagtactcaaaatacctatagtagaagctgggtattatagggagatatacccctacctaccggctaagaaaactaaatataggatttataaacccctaccgagataggggctatacctactaaaagagctgctcctatagaagagagggctgcctaaccaatagaatcctccgataaggatattagagaaaataaaagaaggcttatagctaaatagcgagaccttaaggccctcgaaaaacagcttataattattaactagaaagccgaactcttactatacctttataactagaaccttatagctattgccttagaggaagaattaagtatactatacctactactacttaagggagatattacctaagtactagaatccctaaaccctatattaaggatactagtaataccttaaccttccctaatagtagtaggggactataataataatataggtatagtataaagtagtaaaacctcctaagttaaggaactataaagtctatctaatatactagtattctatagtaaaactatagataaataggatatatttaaggtaaaataagaagtattttaagtaagatacctataatagtttaccttagataaagtaagggttatataggtaatagaattcctcttaaataaggttacctagggttagatataatactaaaagaataatcctataaagtagattatataggatatattcgaaacttaggccttaacctaagttatagacctagtatagttatagtataaagtaaaagccgattaatagtaagctatatagaagctggaatagagtatatattaatatacctaatacctaatagggatctataaccacttacactctatactattagattaggtatatatcgactgcctagagataggtattttaagagagatctaaaccgaagcctaatagtaggacctacctaaaataaagatctataataattaggtagcctatcttagctttatagagagctaaatacctttatatactataaagctataggttaagcgatacctatataggtagaataggaatatagacttaaaggataatagtaagaagttattagactaaggctaggaactatctaccttataggatagctaaaaggagtagttattatcctctaataagaggaaataaggctaaggggtaaaattagataactagataaaggacttatattacttatataaggaagctagatatattataagaatttacctaaaagctaagtagctttagaagaataacttaaaggagctaaaaaaatagataaccctatactataggctataatagtactaggaataacccttagagagggttagtagaagggctaaagtatattagtatataatatacttatcttagatatttataagggtatcctaatagggattactagaattctaattaatagtagggctacttagacctttattagctaaagataggcaaaggagaatctagaagatataaaagggataccctatctagtaaaagtaattaataggtataaaatccacttatatagtagctaagagattactttctagcttatagatagtactagaagatatagtattataaagatatattataaggctattaatatattaggatataatatagtcttagggatagactaactctatatagtaaatctaaatattaactagagtactagctattagttatactataagggtaccttactagaaatagagatagtcttcttaaaagagtttaagaaggaactgtatctatataatatcttttatatactttatattagaccgctagatctattagaagaaggcaaatagttaggaactatatagatagataaccccttactataagtatatagagactttatagatatctttaataaagctctagctttaatcctactagaatatactatatataattatactattaacctaaagttaggaaaggtacctctatttaggttactatacttactatcgaatatagagttagaagtcctatatatctatattaataagaaccttaagagggactagatctaatatttaaagagccttataaaggtacctattctttttatactaaagaaggatagtaagcttcggctatatatagacttctatagattaaatataattattattaagaaccactacctcttacctttaattagtaaatccctattaagacttattagtataaaggtctatattaagctagaccttagagatatatactataggatctatattaagaaaggtaataaatagaaaatagtatttagaattaattatactataagggtaccctactagaaatagagatagtctccctaaaagagtttaagaaagaactatatttatatagtatcttttatatactttatattagactactagatctattagaagaagataaacggttaggaactatatagatagataactccctactataagtatatagagactttatagatatctttaataaagctttagctttaatcctactagaatatattatatataattatattatcgatctagaactaggaaaggtacccctatttaggttactatatttactattaaatatagaattagaagtcctatatacctatattaataagaaccttaagagggactagatctaatatttaaagagccctataaggatacctattctttttatattaaagaaggatagtaaactttagctatatatagacttctatagattaaatataattactattaagaactactattccttacccttaattaataaatccctattaagacttactagtataaaggtctatactaaactagaccttagagatatatactataggatctatattaagaaaggtaataaatagaaaacggtatttagaacctactatagatatttcgagtattatataatactatttaggcttataaatatacctataaccttctaagcttatataaataaggctcttataagattattagatatcttcctagtaatctacttaaataatatcttaatcttttcctaggataaggaatcttatatagaatatatataaatagtattagaatagctctactagtttaaactctatataaaggctttaaaatataccttctatacttcttaagtagagttccttagatttattatctctaataatagtatttctatagaccctacctaagtagaagtaattattacttagctaaagctagagtatatcttcgatatatagtaatttataggcttcgcgaacttttactataaatttattaaattatacttaaagattatagggctacttaatatattagtctaaggcctaaatatatagaagaaggggaagaataaaaagaagctaggcttctactttaataaaactataaggaaggctttttaagagattaaagagattttctaaaaagcccctttccttatatactttaactccctactaagaaccttagtagaatctaatatattaggtaaagtaattagagtaatctacttatagctataaaaagagagtagtacttagaaactaattatattcttcttatataagataagnnnnnnnnnnnnnnnnnnnnnnnnnnnnnnnnnnnnnnnnnnnnnnnnnnnnnnnnnnnnnnnnnnnnnnnnnnnnnnnnnnnnnnnnnnnnnnnnnnnnnnnnnnnnnnnnnnnnnnnnnnnnnnnnnnnnnnnnnnnnnnnnnnnnnnnnnnnnnnnnnnnnnnnnnnnnnnnnnnnnnnnnnnnnnnnnnnnnnnnnnnnnnnnnnnnnnnnnnnnnnnnnnnnnnnnnnnnnnnnnnnnnnnnnnnnnnnnnnnnnnnnnnnnnnnnnnnnnnnnnnnnnnnnnnnnnnnnnnnnnnnnnnnnnnnnnnnnnnnnnnnnnnnnnnnnnnnnnnnnnnnnnnnnnnnnnnnnnnnnnnnnnnnnnnnnnnnnnnnnnnnnnnnnnnnnnnnnnnnnnnnnnnnnnnnnnnnnnnnnnnnnnnnnnnnnnnnnnnnnnnnnnnnnnnnnnnnnnnnnnnnnnnnnnnnnnnnnnnnnnnnnnnnnnnnnnnnnnnnnnnnnnnnnnnnnnnnnnnnnnnnnnnnnnnnnnnnnnnnnnnnnnnnnnnnnnnnnnnnnnnnnnnnnnnnnnnnnnnnnnnnnnnnnnnnnnnnnnnnnnnnnnnnnnnnnnnnnnnnnnnnnnnnnnnnnnnnnnnnnnnnnnnnnnnnnnnnnnnnnnnnnnnnnnnnnnnnnnnnnnnnnnnnnnnnnnnnnnnnnnnnnnnnnnnnnnnnnnnnnnnnnnnnnnnnnnnnnnnnnnnnnnnnnnnnnnnnnnnnnnnnnnnnnnnnnnnnnnnnnnnnnnnnnnnnnnnnnnnnnnnnnnnnnnnnnnnnnnnnnnnnnnnnnnnnnnnnnnnnnnnnnnnnnnnnnnnnnnnnnnnnnnnnnnnnnnnnnnnnnnnnnnnnnnnnnnnnnnnnnnnnnnnnnnnnnnnnnnnnnnnnnnnnnnnnnnnnnnnnnnnnnnnnnnnnnnnnnnnnnnnnnnnnnnnnnnnnnnnnnnnnnnnnnnnnnnnnnnnnnnnnnnnnnnnnnnnnnnnnnnnnnnnnnnnnnnnnnnnnnnnnnnnnnnnnnnnnnnnnnnnnnnnnnnnnnnnnnnnnnnnnnnnnnnnnnnnnnnnnnnnnnnnnnnnnnnnnnnnnnnnnnnnnnnnnnnnnnnnnnnnnnnnnnnnnnnnnnnnnnnnnnnnnnnnnnnnnnnnnnnnnnnnnnnnnnnnnnnnnnnnnnnnnnnnnnnnnnnnnnnnnnnnnnnnnnnnnnnnnnnnnnnnnnnnnnnnnnnnnnnnnnnnnnnnnnnnnnnnnnnnnnnnnnnnnnnnnnnnnnnnnnnnnnnnnnnnnnnnnnnnnnnnnnnnnnnnnnnnnnnnnnnnnnnnnnnnnnnnnnnnnnnnnnnnnnnnnnnnnnnnnnnnnnnnnnnnnnnnnnnnnnnnnnnnnnnnnnnnnnnnnnnnnnnnnnnnnnnnnnnnnnnnnnnnnnnnnnnnnnnnnnnnnnnnnnnnnnnnnnnnnnnnnnnnnnnnnnnnnnnnnnnnnnnnnnnnnnnnnnnnnnnnnnnnnnnnnnnnnnnnnnnnnnnnnnnnnnnnnnnnnnnnnnnnnnnnnnnnnnnnnnnnnnnnnnnnnnnnnnnnnnnnnnnnnnnnnnnnnnnnnnnnnnnnnnnnnnnnnnnnnnnnnnnnnnnnnnnnnnnnnnnnnnnnnnnnnnnnnnnnnnnnnnnnnnnnnnnnnnnnnnnnnnnnnnnnnnnnnnnnnnnnnnnnnnnnnnnnnnnnnnnnnnnnnnnnnnnnnnnnnnnnnnnnnnnnnnnnnnnnnnnnnnnnnnnnnnnnnnnnnnnnnnnnnnnnnnnnnnnnnnnnnnnnnnnnnnnnnnnnnnnnnnnnnnnnnnnnnnnnnnnnnnnnnnnnnnnnnnnnnnnnnnnnnnnnnnnnnnnnnnnnnnnnnnnnnnnnnnnnnnnnnnnnnnnnnnnnnnnnnnnnnnnnnnnnnnnnnnnnnnnnnnnnnnnnnnnnnnnnnnnnnnnnnnnnnnnnnnnnnnnnnnnnnnnnnnnnnnnnnnnnnnnnnnnnnnnnnnnnnnnnnnnnnnnnnnnnnnnnnnnnnnnnnnnnnnnnnnnnnnnnnnnnnnnnnnnnnnnnnnnnnnnnnnnnnnnnnnnnnnnnnnnnnnnnnnnnnnnnnnnnnnnnnnnnnnnnnnnnnnnnnnnnnnnnnnnnnnnnnnnnnnnnnnnnnnnnnnnnnnnnnnnnnnnnnnnnnnnnnnnnnnnnnnnnnnnnnnnnnnnnnnnnnnnnnnnnnnnnnnnnnnnnnnnnnnnnnnnnnnnnnnnnnnnnnnnnnnnnnnnnnnnnnnnnnnnnnnnnnnnnnnnnnnnnnnnnnnnnnnnnnnnnnnnnnnnnnnnnnnnnnnnnnnnnnnnnnnnnnnnnnnnnnnnnnnnnnnnnnnnnnnnnnnnnnnnnnnnnnnnnnnnnnnnnnnnnnnnnnnnnnnnnnnnnnnnnnnnnnnnnnnnnnnnnnnnnnnnnnnnnnnnnnnnnnnnnnnnnnnnnnnnnnnnnnnnnnnnnnnnnnnnnnnnnnnnnnnnnnnnnnnnnnnnnnnnnnnnnnnnnnnnnnnnnnnnnnnnnnnnnnnnnnnnnnnnnnnnnnnnnnnnnnnnnnnnnnnnnnnnnnnnnnnnnnnnnnnnnnnnnnnnnnnnnnnnnnnnnnnnnnnnnnnnnnnnnnnnnnnnnnnnnnnnnnnnnnnnnnnnnnnnnnnnnnnnnnnnnnnnnnnnnnnnnnnnnnnnnnnnnnnnnnnnnnnnnnnnnnnnnnnnnnnnnnnnnnnnnnnnnnnnnnnnnnnnnnnnnnnnnnnnnnnnnnnnnnnnnnnnnnnnnnnnnnnnnnnnnnnnnnnnnnnnnnnnnnnnnnnnnnnnnnnnnnnnnnnnnnnnnnnnnnnnnnnnnnnnnnnnnnnnnnnnnnnnnnnnnnnnnnnnnnnnnnnnnnnnnnnnnnnnnnnnnnnnnnnnnnnnnnnnnnnnnnnnnnnnnnnnnnnnnnnnnnnnnnnnnnnnnnnnnnnnnnnnnnnnnnnnnnnnnnnnnnnnnnnnnnnnnnnnnnnnnnnnnnnnnnnnnnnnnnnnnnnnnnnnnnnnnnnnnnnnnnnnnnnnnnnnnnnnnnnnnnnnnnnnnnnnnnnnnnnnnnnnnnnnnnnnnnnnnnnnnnnnnnnnnnnnnnnnnnnnnnnnnnnnnnnnnnnnnnnnnnnnnnnnnnnnnnnnnnnnnnnnnnnnnnnnnnnnnnnnnnnnnnnnnnnnnnnnnnnnnnnnnnnnnnnnnnnnnnnnnnnnnnnnnnnnnnnnnnnnnnnnnnnnnnnnnnnnnnnnnnnnnnnnnnnnnnnnnnnnnnnnnnnnnnnnnnnnnnnnnnnnnnnnnnnnnnnnnnnnnnnnnnnnnnnnnnnnnnnnnnnnnnnnnnnnnnnnnnnnnnnnnnnnnnnnnnnnnnnnnnnnnnnnnnnnnnnnnnnnnnnnnnnnnnnnnnnnnnnnnnnnnnnnnnnnnnnnnnnnnnnnnnnnnnnnnnnnnnnnnnnnnnnnnnnnnnnnnnnnnnnnnnnnnnnnnnnnnnnnnnnnnnnnnnnnnnnnnnnnnnnnnnnnnnnnnnnnnnnnnnnnnnnnnnnnnnnnnnnnnnnnnnnnnnnnnnnnnnnnnnnnnnnnnnnnnnnnnnnnnnnnnnnnnnnnnnnnnnnnnnnnnnnnnnnnnnnnnnnnnnnnnnnnnnnnnnnnnnnnnnnnnnnnnnnnnnnnnnnnnnnnnnnnnnnnnnnnnnnnnnnnnnnnnnnnnnnnnnnnnnnnnnnnnnnnnnnnnnnnnnnnnnnnnnnnnnnnnnnnnnnnnnnnnnnnnnnnnnnnnnnnnnnnnnnnnnnnnnnnnnnnnnnnnnnnnnnnnnnnnnnnnnnnnnnnnnnnnnnnnnnnnnnnnnnnnnnnnnnnnnnnnnnnnnnnnnnnnnnnnnnnnnnnnnnnnnnnnnnnnnnnnnnnnnnnnnnnnnnnnnnnnnnnnnnnnnnnnnnnnnnnnnnnnnnnnnnnnnnnnnnnnnnnnnnnnnnnnnnnnnnnnnnnnnnnnnnnnnnnnnnnnnnnnnnnnnnnnnnnnnnnnnnnnnnnnnnnnnnnnnnnnnnnnnnnnnnnnnnnnnnnnnnnnnnnnnnnnnnnnnnnnnnnnnnnnnnnnnnnnnnnnnnnnnnnnnnnnnnnnnnnnnnnnnnnnnnnnnnnnnnnnnnnnnnnnnnnnnnnnnnnnnnnnnnnnnnnnnnnnnnnnnnnnnnnnnnnnnnnnnnnnnnnnnnnnnnnnnnnnnnnnnnnnnnnnnnnnnnnnnnnnnnnnnnnnnnnnnnnnnnnnnnnnnnnnnnnnnnnnnnnnnnnnnnnnnnnnnnnnnnnnnnnnnnnnnnnnnnnnnnnnnnnnnnnnnnnnnnnnnnnnnnnnnnnnnnnnnnnnnnnnnnnnnnnnnnnnnnnnnnnnnnnnnnnnnnnnnnnnnnnnnnnnnnnnnnnnnnnnnnnnnnnnnnnnnnnnnnnnnnnnnnnnnnnnnnnnnnnnnnnnnnnnnnnnnnnnnnnnnnnnnnnnnnnnnnnnnnnnnnnnnnnnnnnnnnnnnnnnnnnnnnnnnnnnnnnnnnnnnnnnnnnnnnnnnnnnnnnnnnnnnnnnnnnnnnnnnnnnnnnnnnnnnnnnnnnnnnnnnnnnnnnnnnnnnnnnnnnnnnnnnnnnnnnnnnnnnnnnnnnnnnnnnnnnnnnnnnnnnnnnnnnnnnnnnnnnnnnnnnnnnnnnnnnnnnnnnnnnnnnnnnnnnnnnnnnnnnnnnnnnnnnnnnnnnnnnnnnnnnnnnnnnnnnnnnnnnnnnnnnnnnnnnnnnnnnnnnnnnnnnnnnnnnnnnnnnnnnnnnnnnnnnnnnnnnnnnnnnnnnnnnnnnnnnnnnnnnnnnnnnnnnnnnnnnnnnnnnnnnnnnnnnnnnnnnnnnnnnnnnnnnnnnnnnnnnnnnnnnnnnnnnnnnnnnnnnnnnnnnnnnnnnnnnnnnnnnnnnnnnnnnnnnnnnnnnnnnnnnnnnnnnnnnnnnnnnnnnnnnnnnnnnnnnnnnnnnnnnnnnnnnnnnnnnnnnnnnnnnnnnnnnnnnnnnnnnnnnnnnnnnnnnnnnnnnnnnnnnnnnnnnnnnnnnnnnnnnnnnnnnnnnnnnnnnnnnnnnnnnnnnnnnnnnnnnnnnnnnnnnnnnnnnnnnnnnnnnnnnnnnnnnnnnnnnnnnnnnnnnnnnnnnnnnnnnnnnnnnnnnnnnnnnnnnnnnnnnnnnnnnnnnnnnnnnnnnnnnnnnnnnnnnnnnnnnnnnnnnnnnnnnnnnnnnnnnnnnnnnnnnnnnnnnnnnnnnnnnnnnnnnnnnnnnnnnnnnnnnnnnnnnnnnnnnnnnnnnnnnnnnnnnnnnnnnnnnnnnnnnnnnnnnnnnnnnnnnnnnnnnnnnnnnnnnnnnnnnnnnnnnnnnnnnnnnnnnnnnnnnnnnnnnnnnnnnnnnnnnnnnnnnnnnnnnnnnnnnnnnnnnnnnnnnnnnnnnnnnnnnnnnnnnnnnnnnnnnnnnnnnnnnnnnnnnnnnnnnnnnnnnnnnnnnnnnnnnnnnnnnnnnnnnnnnnnnnnnnnnnnnnnnnnnnnnnnnnnnnnnnnnnnnnnnnnnnnnnnnnnnnnnnnnnnnnnnnnnnnnnnnnnnnnnnnnnnnnnnnnnnnnnnnnnnnnnnnnnnnnnnnnnnnnnnnnnnnnnnnnnnnnnnnnnnnnnnnnnnnnnnnnnnnnnnnnnnnnnnnnnnnnnnnnnnnnnnnnnnnnnnnnnnnnnnnnnnnnnnnnnnnnnnnnnnnnnnnnnnnnnnnnnnnnnnnnnnnnnnnnnnnnnnnnnnnnnnnnnnnnnnnnnnnnnnnnnnnnnnnnnnnnnnnnnnnnnnnnnnnnnnnnnnnnnnnnnnnnnnnnnnnnnnnnnnnnnnnnnnnnnnnnnnnnnnnnnnnnnnnnnnnnnnnnnnnnnnnnnnnnnnnnnnnnnnnnnnnnnnnnnnnnnnnnnnnnnnnnnnnnnnnnnnnnnnnnnnnnnnnnnnnnnnnnnnnnnnnnnnnnnnnnnnnnnnnnnnnnnnnnnnnnnnnnnnnnnnnnnnnnnnnnnnnnnnnnnnnnnnnnnnnnnnnnnnnnnnnnnnnnnnnnnnnnnnnnnnnnnnnnnnnnnnnnnnnnnnnnnnnnnnnnnnnnnnnnnnnnnnnnnnnnnnnnnnnnnnnnnnnnnnnnnnnnnnnnnnnnnnnnnnnnnnnnnnnnnnnnnnnnnnnnnnnnnnnnnnnnnnnnnnnnnnnnnnnnnnnnnnnnnnnnnnnnnnnnnnnnnnnnnnnnnnnnnnnnnnnnnnnnnnnnnnnnnnnnnnnnnnnnnnnnnnnnnnnnnnnnnnnnnnnnnnnnnnnnnnnnnnnnnnnnnnnnnnnnnnnnnnnnnnnnnnnnnnnnnnnnnnnnnnnnnnnnnnnnnnnnnnnnnnnnnnnnnnnnnnnnnnnnnnnnnnnnnnnnnnnnnnnnnnnnnnnnnnnnnnnnnnnnnnnnnnnnnnnnnnnnnnnnnnnnnnnnnnnnnnnnnnnnnnnnnnnnnnnnnnnnnnnnnnnnnnnnnnnnnnnnnnnnnnnnnnnnnnnnnnnnnnnnnnnnnnnnnnnnnnnnnnnnnnnnnnnnnnnnnnnnnnnnnnnnnnnnnnnnnnnnnnnnnnnnnnnnnnnnnnnnnnnnnnnnnnnnnnnnnnnnnnnnnnnnnnnnnnnnnnnnnnnnnnnnnnnnnnnnnnnnnnnnnnnnnnnnnnnnnnnnnnnnnnnnnnnnnnnnnnnnnnnnnnnnnnnnnnnnnnnnnnnnnnnnnnnnnnnnnnnnnnnnnnnnnnnnnnnnnnnnnnnnnnnnnnnnnnnnnnnnnnnnnnnnnnnnnnnnnnnnnnnnnnnnnnnnnnnnnnnnnnnnnnnnnnnnnnnnnnnnnnnnnnnnnnnnnnnnnnnnnnnnnnnnnnnnnnnnnnnnnnnnnnnnnnnnnnnnnnnnnnnnnnnnnnnnnnnnnnnnnnnnnnnnnnnnnnnnnnnnnnnnnnnnnnnnnnnnnnnnnnnnnnnnnnnnnnnnnnnnnnnnnnnnnnnnnnnnnnnnnnnnnnnnnnnnnnnnnnnnnnnnnnnnnnnnnnnnnnnnnnnnnnnnnnnnnnnnnnnnnnnnnnnnnnnnnnnnnnnnnnnnnnnnnnnnnnnnnnnnnnnnnnnnnnnnnnnnnnnnnnnnnnnnnnnnnnnnnnnnnnnnnnnnnnnnnnnnnnnnnnnnnnnnnnnnnnnnnnnnnnnnnnnnnnnnnnnnnnnnnnnnnnnnnnnnnnnnnnnnnnnnnnnnnnnnnnnnnnnnnnnnnnnnnnnnnnnnnnnnnnnnnnnnnnnnnnnnnnnnnnnnnnnnnnnnnnnnnnnnnnnnnnnnnnnnnnnnnnnnnnnnnnnnnnnnnnnnnnnnnnnnnnnnnnnnnnnnnnnnnnnnnnnnnnnnnnnnnnnnnnnnnnnnnnnnnnnnnnnnnnnnnnnnnnnnnnnnnnnnnnnnnnnnnnnnnnnnnnnnnnnnnnnnnnnnnnnnnnnnnnnnnnnnnnnnnnnnnnnnnnnnnnnnnnnnnnnnnnnnnnnnnnnnnnnnnnnnnnnnnnnnnnnnnnnnnnnnnnnnnnnnnnnnnnnnnnnnnnnnnnnnnnnnnnnnnnnnnnnnnnnnnnnnnnnnnnnnnnnnnnnnnnnnnnnnnnnnnnnnnnnnnnnnnnnnnnnnnnnnnnnnnnnnnnnnnnnnnnnnnnnnnnnnnnnnnnnnnnnnnnnnnnnnnnnnnnnnnnnnnnnnnnnnnnnnnnnnnnnnnnnnnnnnnnnnnnnnnnnnnnnnnnnnnnnnnnnnnnnnnnnnnnnnnnnnnnnnnnnnnnnnnnnnnnnnnnnnnnnnnnnnnnnnnnnnnnnnnnnnnnnnnnnnnnnnnnnnnnnnnnnnnnnnnnnnnnnnnnnnnnnnnnnnnnnnnnnnnnnnnnnnnnnnnnnnnnnnnnnnnnnnnnnnnnnnnnnnnnnnnnnnnnnnnnnnnnnnnnnnnnnnnnnnnnnnnnnnnnnnnnnnnnnnnnnnnnnnnnnnnnnnnnnnnnnnnnnnnnnnnnnnnnnnnnnnnnnnnnnnnnnnnnnnnnnnnnnnnnnnnnnnnnnnnnnnnnnnnnnnnnnnnnnnnnnnnnnnnnnnnnnnnnnnnnnnnnnnnnnnnnnnnnnnnnnnnnnnnnnnnnnnnnnnnnnnnnnnnnnnnnnnnnnnnnnnnnnnnnnnnnnnnnnnnnnnnnnnnnnnnnnnnnnnnnnnnnnnnnnnnnnnnnnnnnnnnnnnnnnnnnnnnnnnnnnnnnnnnnnnnnnnnnnnnnnnnnnnnnnnnnnnnnnnnnnnnnnnnnnnnnnnnnnnnnnnnnnnnnnnnnnnnnnnnnnnnnnnnnnnnnnnnnnnnnnnnnnnnnnnnnnnnnnnnnnnnnnnnnnnnnnnnnnnnnnnnnnnnnnnnnnnnnnnnnnnnnnnnnnnnnnnnnnnnnnnnnnnnnnnnnnnnnnnnnnnnnnnnnnnnnnnnnnnnnnnnnnnnnnnnnnnnnnnnnnnnnnnnnnnnnnnnnnnnnnnnnnnnnnnnnnnnnnnnnnnnnnnnnnnnnnnnnnnnnnnnnnnnnnnnnnnnnnnnnnnnnnnnnnnnnnnnnnnnnnnnnnnnnnnnnnnnnnnnnnnnnnnnnnnnnnnnnnnnnnnnnnnnnnnnnnnnnnnnnnnnnnnnnnnnnnnnnnnnnnnnnnnnnnnnnnnnnnnnnnnnnnnnnnnnnnnnnnnnnnnnnnnnnnnnnnnnnnnnnnnnnnnnnnnnnnnnnnnnnnnnnnnnnnnnnnnnnnnnnnnnnnnnnnnnnnnnnnnnnnnnnnnnnnnnnnnnnnnnnnnnnnnnnnnnnnnnnnnnnnnnnnnnnnnnnnnnnnnnnnnnnnnnnnnnnnnnnnnnnnnnnnnnnnnnnnnnnnnnnnnnnnnnnnnnnnnnnnnnnnnnnnnnnnnnnnnnnnnnnnnnnnnnnnnnnnnnnnnnnnnnnnnnnnnnnnnnnnnnnnnnnnnnnnnnnnnnnnnnnnnnnnnnnnnnnnnnnnnnnnnnnnnnnnnnnnnnnnnnnnnnnnnnnnnnnnnnnnnnnnnnnnnnnnnnnnnnnnnnnnnnnnnnnnnnnnnnnnnnnnnnnnnnnnnnnnnnnnnnnnnnnnnnnnnnnnnnnnnnnnnnnnnnnnnnnnnnnnnnnnnnnnnnnnnnnnnnnnnnnnnnnnnnnnnnnnnnnnnnnnnnnnnnnnnnnnnnnnnnnnnnnnnnnnnnnnnnnnnnnnnnnnnnnnnnnnnnnnnnnnnnnnnnnnnnnnnnnnnnnnnnnnnnnnnnnnnnnnnnnnnnnnnnnnnnnnnnnnnnnnnnnnnnnnnnnnnnnnnnnnnnnnnnnnnnnnnnnnnnnnnnnnnnnnnnnnnnnnnnnnnnnnnnnnnnnnnnnnnnnnnnnnnnnnnnnnnnnnnnnnnnnnnnnnnnnnnnnnnnnnnnnnnnnnnnnnnnnnnnnnnnnnnnnnnnnnnnnnnnnnnnnnnnnnnnnnnnnnnnnnnnnnnnnnnnnnnnnnnnnnnnnnnnnnnnnnnnnnnnnnnnnnnnnnnnnnnnnnnnnnnnnnnnnnnnnnnnnnnnnnnnnnnnnnnnnnnnnnnnnnnnnnnnnnnnnnnnnnnnnnnnnnnnnnnnnnnnnnnnnnnnnnnnnnnnnnnnnnnnnnnnnnnnnnnnnnnnnnnnnnnnnnnnnnnnnnnnnnnnnnnnnnnnnnnnnnnnnnnnnnnnnnnnnnnnnnnnnnnnnnnnnnnnnnnnnnnnnnnnnnnnnnnnnnnnnnnnnnnnnnnnnnnnnnnnnnnnnnnnnnnnnnnnnnnnnnnnnnnnnnnnnnnnnnnnnnnnnnnnnnnnnnnnnnnnnnnnnnnnnnnnnnnnnnnnnnnnnnnnnnnnnnnnnnnnnnnnnnnnnnnnnnnnnnnnnnnnnnnnnnnnnnnnnnnnnnnnnnnnnnnnnnnnnnnnnnnnnnnnnnnnnnnnnnnnnnnnnnnnnnnnnnnnnnnnnnnnnnnnnnnnnnnnnnnnnnnnnnnnnnnnnnnnnnnnnnnnnnnnnnnnnnnnnnnnnnnnnnnnnnnnnnnnnnnnnnnnnnnnnnnnnnnnnnnnnnnnnnnnnnnnnnnnnnnnnnnnnnnnnnnnnnnnnnnnnnnnnnnnnnnnnnnnnnnnnnnnnnnnnnnnnnnnnnnnnnnnnnnnnnnnnnnnnnnnnnnnnnnnnnnnnnnnnnnnnnnnnnnnnnnnnnnnnnnnnnnnnnnnnnnnnnnnnnnnnnnnnnnnnnnnnnnnnnnnnnnnnnnnnnnnnnnnnnnnnnnnnnnnnnnnnnnnnnnnnnnnnnnnnnnnnnnnnnnnnnnnnnnnnnnnnnnnnnnnnnnnnnnnnnnnnnnnnnnnnnnnnnnnnnnnnnnnnnnnnnnnnnnnnnnnnnnnnnnnnnnnnnnnnnnnnnnnnnnnnnnnnnnnnnnnnnnnnnnnnnnnnnnnnnnnnnnnnnnnnnnnnnnnnnnnnnnnnnnnnnnnnnnnnnnnnnnnnnnnnnnnnnnnnnnnnnnnnnnnnnnnnnnnnnnnnnnnnnnnnnnnnnnnnnnnnnnnnnnnnnnnnnnnnnnnnnnnnnnnnnnnnnnnnnnnnnnnnnnnnnnnnnnnnnnnnnnnnnnnnnnnnnnnnnnnnnnnnnnnnnnnnnnnnnnnnnnnnnnnnnnnnnnnnnnnnnnnnnnnnnnnnnnnnnnnnnnnnnnnnnnnnnnnnnnnnnnnnnnnnnnnnnnnnnnnnnnnnnnnnnnnnnnnnnnnnnnnnnnnnnnnnnnnnnnnnnnnnnnnnnnnnnnnnnnnnnnnnnnnnnnnnnnnnnnnnnnnnnnnnnnnnnnnnnnnnnnnnnnnnnnnnnnnnnnnnnnnnnnnnnnnnnnnnnnnnnnnnnnnnnnnnnnnnnnnnnnnnnnnnnnnnnnnnnnnnnnnnnnnnnnnnnnnnnnnnnnnnnnnnnnnnnnnnnnnnnnnnnnnnnnnnnnnnnnnnnnnnnnnnnnnnnnnnnnnnnnnnnnnnnnnnnnnnnnnnnnnnnnnnnnnnnnnnnnnnnnnnnnnnnnnnnnnnnnnnnnnnnnnnnnnnnnnnnnnnnnnnnnnnnnnnnnnnnnnnnnnnnnnnnnnnnnnnnnnnnnnnnnnnnnnnnnnnnnnnnnnnnnnnnnnnnnnnnnnnnnnnnnnnnnnnnnnnnnnnnnnnnnnnnnnnnnnnnnnnnnnnnnnnnnnnnnnnnnnnnnnnnnnnnnnnnnnnnnnnnnnnnnnnnnnnnnnnnnnnnnnnnnnnnnnnnnnnnnnnnnnnnnnnnnnnnnnnnnnnnnnnnnnnnnnnnnnnnnnnnnnnnnnnnnnnnnnnnnnnnnnnnnnnnnnnnnnnnnnnnnnnnnnnnnnnnnnnnnnnnnnnnnnnnnnnnnnnnnnnnnnnnnnnnnnnnnnnnnnnnnnnnnnnnnnnnnnnnnnnnnnnnnnnnnnnnnnnnnnnnnnnnnnnnnnnnnnnnnnnnnnnnnnnnnnnnnnnnnnnnnnnnnnnnnnnnnnnnnnnnnnnnnnnnnnnnnnnnnnnnnnnnnnnnnnnnnnnnnnnnnnnnnnnnnnnnnnnnnnnnnnnnnnnnnnnnnnnnnnnnnnnnnnnnnnnnnnnnnnnnnnnnnnnnnnnnnnnnnnnnnnnnnnnnnnnnnnnnnnnnnnnnnnnnnnnnnnnnnnnnnnnnnnnnnnnnnnnnnnnnnnnnnnnnnnnnnnnnnnnnnnnnnnnnnnnnnnnnnnnnnnnnnnnnnnnnnnnnnnnnnnnnnnnnnnnnnnnnnnnnnnnnnnnnnnnnnnnnnnnnnnnnnnnnnnnnnnnnnnnnnnnnnnnnnnnnnnnnnnnnnnnnnnnnnnnnnnnnnnnnnnnnnnnnnnnnnnnnnnnnnnnnnnnnnnnnnnnnnnnnnnnnnnnnnnnnnnnnnnnnnnnnnnnnnnnnnnnnnnnnnnnnnnnnnnnnnnnnnnnnnnnnnnnnnnnnnnnnnnnnnnnnnnnnnnnnnnnnnnnnnnnnnnnnnnnnnnnnnnnnnnnnnnnnnnnnnnnnnnnnnnnnnnnnnnnnnnnnnnnnnnnnnnnnnnnnnnnnnnnnnnnnnnnnnnnnnnnnnnnnnnnnnnnnnnnnnnnnnnnnnnnnnnnnnnnnnnnnnnnnnnnnnnnnnnnnnnnnnnnnnnnnnnnnnnnnnnnnnnnnnnnnnnnnnnnnnnnnnnnnnnnnnnnnnnnnnnnnnnnnnnnnnnnnnnnnnnnnnnnnnnnnnnnnnnnnnnnnnnnnnnnnnnnnnnnnnnnnnnnnnnnnnnnnnnnnnnnnnnnnnnnnnnnnnnnnnnnnnnnnnnnnnnnnnnnnnnnnnnnnnnnnnnnnnnnnnnnnnnnnnnnnnnnnnnnnnnnnnnnnnnnnnnnnnnnnnnnnnnnnnnnnnnnnnnnnnnnnnnnnnnnnnnnnnnnnnnnnnnnnnnnnnnnnnnnnnnnnnnnnnnnnnnnnnnnnnnnnnnnnnnnnnnnnnnnnnnnnnnnnnnnnnnnnnnnnnnnnnnnnnnnnnnnnnnnnnnnnnnnnnnnnnnnnnnnnnnnnnnnnnnnnnnnnnnnnnnnnnnnnnnnnnnnnnnnnnnnnnnnnnnnnnnnnnnnnnnnnnnnnnnnnnnnnnnnnnnnnnnnnnnnnnnnnnnnnnnnnnnnnnnnnnnnnnnnnnnnnnnnnnnnnnnnnnnnnnnnnnnnnnnnnnnnnnnnnnnnnnnnnnnnnnnnnnnnnnnnnnnnnnnnnnnnnnnnnnnnnnnnnnnnnnnnnnnnnnnnnnnnnnnnnnnnnnnnnnnnnnnnnnnnnnnnnnnnnnnnnnnnnnnnnnnnnnnnnnnnnnnnnnnnnnnnnnnnnnnnnnnnnnnnnnnnnnnnnnnnnnnnnnnnnnnnnnnnnnnnnnnnnnnnnnnnnnnnnnnnnnnnnnnnnnnnnnnnnnnnnnnnnnnnnnnnnnnnnnnnnnnnnnnnnnnnnnnnnnnnnnnnnnnnnnnnnnnnnnnnnnnnnnnnnnnnnnnnnnnnnnnnnnnnnnnnnnnnnnnnnnnnnnnnnnnnnnnnnnnnnnnnnnnnnnnnnnnnnnnnnnnnnnnnnnnnnnnnnnnnnnnnnnnnnnnnnnnnnnnnnnnnnnnnnnnnnnnnnnnnnnnnnnnnnnnnnnnnnnnnnnnnnnnnnnnnnnnnnnnnnnnnnnnnnnnnnnnnnnnnnnnnnnnnnnnnnnnnnnnnnnnnnnnnnnnnnnnnnnnnnnnnnnnnnnnnnnnnnnnnnnnnnnnnnnnnnnnnnnnnnnnnnnnnnnnnnnnnnnnnnnnnnnnnnnnnnnnnnnnnnnnnnnnnnnnnnnnnnnnnnnnnnnnnnnnnnnnnnnnnnnnnnnnnnnnnnnnnnnnnnnnnnnnnnnnnnnnnnnnnnnnnnnnnnnnnnnnnnnnnnnnnnnnnnnnnnnnnnnnnnnnnnnnnnnnnnnnnnnnnnnnnnnnnnnnnnnnnnnnnnnnnnnnnnnnnnnnnnnnnnnnnnnnnnnnnnnnnnnnnnnnnnnnnnnnnnnnnnnnnnnnnnnnnnnnnnnnnnnnnnnnnnnnnnnnnnnnnnnnnnnnnnnnnnnnnnnnnnnnnnnnnnnnnnnnnnnnnnnnnnnnnnnnnnnnnnnnnnnnnnnnnnnnnnnnnnnnnnnnnnnnnnnnnnnnnnnnnnnnnnnnnnnnnnnnnnnnnnnnnnnnnnnnnnnnnnnnnnnnnnnnnnnnnnnnnnnnnnnnnnnnnnnnnnnnnnnnnnnnnnnnnnnnnnnnnnnnnnnnnnnnnnnnnnnnnnnnnnnnnnnnnnnnnnnnnnnnnnnnnnnnnnnnnnnnnnnnnnnnnnnnnnnnnnnnnnnnnnnnnnnnnnnnnnnnnnnnnnnnnnnnnnnnnnnnnnnnnnnnnnnnnnnnnnnnnnnnnnnnnnnnnnnnnnnnnnnnnnnnnnnnnnnnnnnnnnnnnnnnnnnnnnnnnnnnnnnnnnnnnnnnnnnnnnnnnnnnnnnnnnnnnnnnnnnnnnnnnnnnnnnnnnnnnnnnnnnnnnnnnnnnnnnnnnnnnnnnnnnnnnnnnnnnnnnnnnnnnnnnnnnnnnnnnnnnnnnnnnnnnnnnnnnnnnnnnnnnnnnnnnnnnnnnnnnnnnnnnnnnnnnnnnnnnnnnnnnnnnnnnnnnnnnnnnnnnnnnnnnnnnnnnnnnnnnnnnnnnnnnnnnnnnnnnnnnnnnnnnnnnnnnnnnnnnnnnnnnnnnnnnnnnnnnnnnnnnnnnnnnnnnnnnnnnnnnnnnnnnnnnnnnnnnnnnnnnnnnnnnnnnnnnnnnnnnnnnnnnnnnnnnnnnnnnnnnnnnnnnnnnnnnnnnnnnnnnnnnnnnnnnnnnnnnnnnnnnnnnnnnnnnnnnnnnnnnnnnnnnnnnnnnnnnnnnnnnnnnnnnnnnnnnnnnnnnnnnnnnnnnnnnnnnnnnnnnnnnnnnnnnnnnnnnnnnnnnnnnnnnnnnnnnnnnnnnnnnnnnnnnnnnnnnnnnnnnnnnnnnnnnnnnnnnnnnnnnnnnnnnnnnnnnnnnnnnnnnnnnnnnnnnnnnnnnnnnnnnnnnnnnnnnnnnnnnnnnnnnnnnnnnnnnnnnnnnnnnnnnnnnnnnnnnnnnnnnnnnnnnnnnnnnnnnnnnnnnnnnnnnnnnnnnnnnnnnnnnnnnnnnnnnnnnnnnnnnnnnnnnnnnnnnnnnnnnnnnnnnnnnnnnnnnnnnnnnnnnnnnnnnnnnnnnnnnnnnnnnnnnnnnnnnnnnnnnnnnnnnnnnnnnnnnnnnnnnnnnnnnnnnnnnnnnnnnnnnnnnnnnnnnnnnnnnnnnnnnnnnnnnnnnnnnnnnnnnnnnnnnnnnnnnnnnnnnnnnnnnnnnnnnnnnnnnnnnnnnnnnnnnnnnnnnnnnnnnnnnnnnnnnnnnnnnnnnnnnnnnnnnnnnnnnnnnnnnnnnnnnnnnnnnnnnnnnnnnnnnnnnnnnnnnnnnnnnnnnnnnnnnnnnnnnnnnnnnnnnnnnnnnnnnnnnnnnnnnnnnnnnnnnnnnnnnnnnnnnnnnnnnnnnnnnnnnnnnnnnnnnnnnnnnnnnnnnnnnnnnnnnnnnnnnnnnnnnnnnnnnnnnnnnnnnnnnnnnnnnnnnnnnnnnnnnnnnnnnnnnnnnnnnnnnnnnnnnnnnnnnnnnnnnnnnnnnnnnnnnnnnnnnnnnnnnnnnnnnnnnnnnnnnnnnnnnnnnnnnnnnnnnnnnnnnnnnnnnnnnnnnnnnnnnnnnnnnnnnnnnnnnnnnnnnnnnnnnnnnnnnnnnnnnnnnnnnnnnnnnnnnnnnnnnnnnnnnnnnnnnnnnnnnnnnnnnnnnnnnnnnnnnnnnnnnnnnnnnnnnnnnnnnnnnnnnnnnnnnnnnnnnnnnnnnnnnnnnnnnnnnnnnnnnnnnnnnnnnnnnnnnnnnnnnnnnnnnnnnnnnnnnnnnnnnnnnnnnnnnnnnnnnnnnnnnnnnnnnnnnnnnnnnnnnnnnnnnnnnnnnnnnnnnnnnnnnnnnnnnnnnnnnnnnnnnnnnnnnnnnnnnnnnnnnnnnnnnnnnnnnnnnnnnnnnnnnnnnnnnnnnnnnnnnnnnnnnnnnnnnnnnnnnnnnnnnnnnnnnnnnnnnnnnnnnnnnnnnnnnnnnnnnnnnnnnnnnnnnnnnnnnnnnnnnnnnnnnnnnnnnnnnnnnnnnnnnnnnnnnnnnnnnnnnnnnnnnnnnnnnnnnnnnnnnnnnnnnnnnnnnnnnnnnnnnnnnnnnnnnnnnnnnnnnnnnnnnnnnnnnnnnnnnnnnnnnnnnnnnnnnnnnnnnnnnnnnnnnnnnnnnnnnnnnnnnnnnnnnnnnnnnnnnnnnnnnnnnnnnnnnnnnnnnnnnnnnnnnnnnnnnnnnnnnnnnnnnnnnnnnnnnnnnnnnnnnnnnnnnnnnnnnnnnnnnnnnnnnnnnnnnnnnnnnnnnnnnnnnnnnnnnnnnnnnnnnnnnnnnnnnnnnnnnnnnnnnnnnnnnnnnnnnnnnnnnnnnnnnnnnnnnnnnnnnnnnnnnnnnnnnnnnnnnnnnnnnnnnnnnnnnnnnnnnnnnnnnnnnnnnnnnnnnnnnnnnnnnnnnnnnnnnnnnnnnnnnnnnnnnnnnnnnnnnnnnnnnnnnnnnnnnnnnnnnnnnnnnnnnnnnnnnnnnnnnnnnnnnnnnnnnnnnnnnnnnnnnnnnnnnnnnnnnnnnnnnnnnnnnnnnnnnnnnnnnnnnnnnnnnnnnnnnnnnnnnnnnnnnnnnnnnnnnnnnnnnnnnnnnnnnnnnnnnnnnnnnnnnnnnnnnnnnnnnnnnnnnnnnnnnnnnnnnnnnnnnnnnnnnnnnnnnnnnnnnnnnnnnnnnnnnnnnnnnnnnnnnnnnnnnnnnnnnnnnnnnnnnnnnnnnnnnnnnnnnnnnnnnnnnnnnnnnnnnnnnnnnnnnnnnnnnnnnnnnnnnnnnnnnnnnnnnnnnnnnnnnnnnnnnnnnnnnnnnnnnnnnnnnnnnnnnnnnnnnnnnnnnnnnnnnnnnnnnnnnnnnnnnnnnnnnnnnnnnnnnnnnnnnnnnnnnnnnnnnnnnnnnnnnnnnnnnnnnnnnnnnnnnnnnnnnnnnnnnnnnnnnnnnnnnnnnnnnnnnnnnnnnnnnnnnnnnnnnnnnnnnnnnnnnnnnnnnnnnnnnnnnnnnnnnnnnnnnnnnnnnnnnnnnnnnnnnnnnnnnnnnnnnnnnnnnnnnnnnnnnnnnnnnnnnnnnnnnnnnnnnnnnnnnnnnnnnnnnnnnnnnnnnnnnnnnnnnnnnnnnnnnnnnnnnnnnnnnnnnnnnnnnnnnnnnnnnnnnnnnnnnnnnnnnnnnnnnnnnnnnnnnnnnnnnnnnnnnnnnnnnnnnnnnnnnnnnnnnnnnnnnnnnnnnnnnnnnnnnnnnnnnnnnnnnnnnnnnnnnnnnnnnnnnnnnnnnnnnnnnnnnnnnnnnnnnnnnnnnnnnnnnnnnnnnnnnnnnnnnnnnnnnnnnnnnnnnnnnnnnnnnnnnnnnnnnnnnnnnnnnnnnnnnnnnnnnnnnnnnnnnnnnnnnnnnnnnnnnnnnnnnnnnnnnnnnnnnnnnnnnnnnnnnnnnnnnnnnnnnnnnnnnnnnnnnnnnnnnnnnnnnnnnnnnnnnnnnnnnnnnnnnnnnnnnnnnnnnnnnnnnnnnnnnnnnnnnnnnnnnnnnnnnnnnnnnnnnnnnnnnnnnnnnnnnnnnnnnnnnnnnnnnnnnnnnnnnnnnnnnnnnnnnnnnnnnnnnnnnnnnnnnnnnnnnnnnnnnnnnnnnnnnnnnnnnnnnnnnnnnnnnnnnnnnnnnnnnnnnnnnnnnnnnnnnnnnnnnnnnnnnnnnnnnnnnnnnnnnnnnnnnnnnnnnnnnnnnnnnnnnnnnnnnnnnnnnnnnnnnnnnnnnnnnnnnnnnnnnnnnnnnnnnnnnnnnnnnnnnnnnnnnnnnnnnnnnnnnnnnnnnnnnnnnnnnnnnnnnnnnnnnnnnnnnnnnnnnnnnnnnnnnnnnnnnnnnnnnnnnnnnnnnnnnnnnnnnnnnnnnnnnnnnnnnnnnnnnnnnnnnnnnnnnnnnnnnnnnnnnnnnnnnnnnnnnnnnnnnnnnnnnnnnnnnnnnnnnnnnnnnnnnnnnnnnnnnnnnnnnnnnnnnnnnnnnnnnnnnnnnnnnnnnnnnnnnnnnnnnnnnnnnnnnnnnnnnnnnnnnnnnnnnnnnnnnnnnnnnnnnnnnnnnnnnnnnnnnnnnnnnnnnnnnnnnnnnnnnnnnnnnnnnnnnnnnnnnnnnnnnnnnnnnnnnnnnnnnnnnnnnnnnnnnnnnnnnnnnnnnnnnnnnnnnnnnnnnnnnnnnnnnnnnnnnnnnnnnnnnnnnnnnnnnnnnnnnnnnnnnnnnnnnnnnnnnnnnnnnnnnnnnnnnnnnnnnnnnnnnnnnnnnnnnnnnnnnnnnnnnnnnnnnnnnnnnnnnnnnnnnnnnnnnnnnnnnnnnnnnnnnnnnnnnnnnnnnnnnnnnnnnnnnnnnnnnnnnnnnnnnnnnnnnnnnnnnnnnnnnnnnnnnnnnnnnnnnnnnnnnnnnnnnnnnnnnnnnnnnnnnnnnnnnnnnnnnnnnnnnnnnnnnnnnnnnnnnnnnnnnnnnnnnnnnnnnnnnnnnnnnnnnnnnnnnnnnnnnnnnnnnnnnnnnnnnnnnnnnnnnnnnnnnnnnnnnnnnnnnnnnnnnnnnnnnnnnnnnnnnnnnnnnnnnnnnnnnnnnnnnnnnnnnnnnnnnnnnnnnnnnnnnnnnnnnnnnnnnnnnnnnnnnnnnnnnnnnnnnnnnnnnnnnnnnnnnnnnnnnnnnnnnnnnnnnnnnnnnnnnnnnnnnnnnnnnnnnnnnnnnnnnnnnnnnnnnnnnnnnnnnnnnnnnnnnnnnnnnnnnnnnnnnnnnnnnnnnnnnnnnnnnnnnnnnnnnnnnnnnnnnnnnnnnnnnnnnnnnnnnnnnnnnnnnnnnnnnnnnnnnnnnnnnnnnnnnnnnnnnnnnnnnnnnnnnnnnnnnnnnnnnnnnnnnnnnnnnnnnnnnnnnnnnnnnnnnnnnnnnnnnnnnnnnnnnnnnnnnnnnnnnnnnnnnnnnnnnnnnnnnnnnnnnnnnnnnnnnnnnnnnnnnnnnnnnnnnnnnnnnnnnnnnnnnnnnnnnnnnnnnnnnnnnnnnnnnnnnnnnnnnnnnnnnnnnnnnnnnnnnnnnnnnnnnnnnnnnnnnnnnnnnnnnnnnnnnnnnnnnnnnnnnnnnnnnnnnnnnnnnnnnnnnnnnnnnnnnnnnnnnnnnnnnnnnnnnnnnnnnnnnnnnnnnnnnnnnnnnnnnnnnnnnnnnnnnnnnnnnnnnnnnnnnnnnnnnnnnnnnnnnnnnnnnnnnnnnnnnnnnnnnnnnnnnnnnnnnnnnnnnnnnnnnnnnnnnnnnnnnnnnnnnnnnnnnnnnnnnnnnnnnnnnnnnnnnnnnnnnnnnnnnnnnnnnnnnnnnnnnnnnnnnnnnnnnnnnnnnnnnnnnnnnnnnnnnnnnnnnnnnnnnnnnnnnnnnnnnnnnnnnnnnnnnnnnnnnnnnnnnnnnnnnnnnnnnnnnnnnnnnnnnnnnnnnnnnnnnnnnnnnnnnnnnnnnnnnnnnnnnnnnnnnnnnnnnnnnnnnnnnnnnnnnnnnnnnnnnnnnnnnnnnnnnnnnnnnnnnnnnnnnnnnnnnnnnnnnnnnnnnnnnnnnnnnnnnnnnnnnnnnnnnnnnnnnnnnnnnnnnnnnnnnnnnnnnnnnnnnnnnnnnnnnnnnnnnnnnnnnnnnnnnnnnnnnnnnnnnnnnnnnnnnnnnnnnnnnnnnnnnnnnnnnnnnnnnnnnnnnnnnnnnnnnnnnnnnnnnnnnnnnnnnnnnnnnnnnnnnnnnnnnnnnnnnnnnnnnnnnnnnnnnnnnnnnnnnnnnnnnnnnnnnnnnnnnnnnnnnnnnnnnnnnnnnnnnnnnnnnnnnnnnnnnnnnnnnnnnnnnnnnnnnnnnnnnnnnnnnnnnnnnnnnnnnnnnnnnnnnnnnnnnnnnnnnnnnnnnnnnnnnnnnnnnnnnnnnnnnnnnnnnnnnnnnnnnnnnnnnnnnnnnnnnnnnnnnnnnnnnnnnnnnnnnnnnnnnnnnnnnnnnnnnnnnnnnnnnnnnnnnnnnnnnnnnnnnnnnnnnnnnnnnnnnnnnnnnnnnnnnnnnnnnnnnnnnnnnnnnnnnnnnnnnnnnnnnnnnnnnnnnnnnnnnnnnnnnnnnnnnnnnnnnnnnnnnnnnnnnnnnnnnnnnnnnnnnnnnnnnnnnnnnnnnnnnnnnnnnnnnnnnnnnnnnnnnnnnnnnnnnnnnnnnnnnnnnnnnnnnnnnnnnnnnnnnnnnnnnnnnnnnnnnnnnnnnnnnnnnnnnnnnnnnnnnnnnnnnnnnnnnnnnnnnnnnnnnnnnnnnnnnnnnnnnnnnnnnnnnnnnnnnnnnnnnnnnnnnnnnnnnnnnnnnnnnnnnnnnnnnnnnnnnnnnnnnnnnnnnnnnnnnnnnnnnnnnnnnnnnnnnnnnnnnnnnnnnnnnnnnnnnnnnnnnnnnnnnnnnnnnnnnnnnnnnnnnnnnnnnnnnnnnnnnnnnnnnnnnnnnnnnnnnnnnnnnnnnnnnnnnnnnnnnnnnnnnnnnnnnnnnnnnnnnnnnnnnnnnnnnnnnnnnnnnnnnnnnnnnnnnnnnnnnnnnnnnnnnnnnnnnnnnnnnnnnnnnnnnnnnnnnnnnnnnnnnnnnnnnnnnnnnnnnnnnnnnnnnnnnnnnnnnnnnnnnnnnnnnnnnnnnnnnnnnnnnnnnnnnnnnnnnnnnnnnnnnnnnnnnnnnnnnnnnnnnnnnnnnnnnnnnnnnnnnnnnnnnnnnnnnnnnnnnnnnnnnnnnnnnnnnnnnnnnnnnnnnnnnnnnnnnnnnnnnnnnnnnnnnnnnnnnnnnnnnnnnnnnnnnnnnnnnnnnnnnnnnnnnnnnnnnnnnnnnnnnnnnnnnnnnnnnnnnnnnnnnnnnnnnnnnnnnnnnnnnnnnnnnnnnnnnnnnnnnnnnnnnnnnnnnnnnnnnnnnnnnnnnnnnnnnnnnnnnnnnnnnnnnnnnnnnnnnnnnnnnnnnnnnnnnnnnnnnnnnnnnnnnnnnnnnnnnnnnnnnnnnnnnnnnnnnnnnnnnnnnnnnnnnnnnnnnnnnnnnnnnnnnnnnnnnnnnnnnnnnnnnnnnnnnnnnnnnnnnnnnnnnnnnnnnnnnnnnnnnnnnnnnnnnnnnnnnnnnnnnnnnnnnnnnnnnnnnnnnnnnnnnnnnnnnnnnnnnnnnnnnnnnnnnnnnnnnnnnnnnnnnnnnnnnnnnnnnnnnnnnnnnnnnnnnnnnnnnnnnnnnnnnnnnnnnnnnnnnnnnnnnnnnnnnnnnnnnnnnnnnnnnnnnnnnnnnnnnnnnnnnnnnnnnnnnnnnnnnnnnnnnnnnnnnnnnnnnnnnnnnnnnnnnnnnnnnnnnnnnnnnnnnnnnnnnnnnnnnnnnnnnnnnnnnnnnnnnnnnnnnnnnnnnnnnnnnnnnnnnnnnnnnnnnnnnnnnnnnnnnnnnnnnnnnnnnnnnnnnnnnnnnnnnnnnnnnnnnnnnnnnnnnnnnnnnnnnnnnnnnnnnnnnnnnnnnnnnnnnnnnnnnnnnnnnnnnnnnnnnnnnnnnnnnnnnnnnnnnnnnnnnnnnnnnnnnnnnnnnnnnnnnnnnnnnnnnnnnnnnnnnnnnnnnnnnnnnnnnnnnnnnnnnnnnnnnnnnnnnnnnnnnnnnnnnnnnnnnnnnnnnnnnnnnnnnnnnnnnnnnnnnnnnnnnnnnnnnnnnnnnnnnnnnnnnnnnnnnnnnnnnnnnnnnnnnnnnnnnnnnnnnnnnnnnnnnnnnnnnnnnnnnnnnnnnnnnnnnnnnnnnnnnnnnnnnnnnnnnnnnnnnnnnnnnnnnnnnnnnnnnnnnnnnnnnnnnnnnnnnnnnnnnnnnnnnnnnnnnnnnnnnnnnnnnnnnnnnnnnnnnnnnnnnnnnnnnnnnnnnnnnnnnnnnnnnnnnnnnnnnnnnnnnnnnnnnnnnnnnnnnnnnnnnnnnnnnnnnnnnnnnnnnnnnnnnnnnnnnnnnnnnnnnnnnnnnnnnnnnnnnnnnnnnnnnnnnnnnnnnnnnnnnnnnnnnnnnnnnnnnnnnnnnnnnnnnnnnnnnnnnnnnnnnnnnnnnnnnnnnnnnnnnnnnnnnnnnnnnnnnnnnnnnnnnnnnnnnnnnnnnnnnnnnnnnnnnnnnnnnnnnnnnnnnnnnnnnnnnnnnnnnnnnnnnnnnnnnnnnnnnnnnnnnnnnnnnnnnnnnnnnnnnnnnnnnnnnnnnnnnnnnnnnnnnnnnnnnnnnnnnnnnnnnnnnnnnnnnnnnnnnnnnnnnnnnnnnnnnnnnnnnnnnnnnnnnnnnnnnnnnnnnnnnnnnnnnnnnnnnnnnnnnnnnnnnnnnnnnnnnnnnnnnnnnnnnnnnnnnnnnnnnnnnnnnnnnnnnnnnnnnnnnnnnnnnnnnnnnnnnnnnnnnnnnnnnnnnnnnnnnnnnnnnnnnnnnnnnnnnnnnnnnnnnnnnnnnnnnnnnnnnnnnnnnnnnnnnnnnnnnnnnnnnnnnnnnnnnnnnnnnnnnnnnnnnnnnnnnnnnnnnnnnnnnnnnnnnnnnnnnnnnnnnnnnnnnnnnnnnnnnnnnnnnnnnnnnnnnnnnnnnnnnnnnnnnnnnnnnnnnnnnnnnnnnnnnnnnnnnnnnnnnnnnnnnnnnnnnnnnnnnnnnnnnnnnnnnnnnnnnnnnnnnnnnnnnnnnnnnnnnnnnnnnnnnnnnnnnnnnnnnnnnnnnnnnnnnnnnnnnnnnnnnnnnnnnnnnnnnnnnnnnnnnnnnnnnnnnnnnnnnnnnnnnnnnnnnnnnnnnnnnnnnnnnnnnnnnnnnnnnnnnnnnnnnnnnnnnnnnnnnnnnnnnnnnnnnnnnnnnnnnnnnnnnnnnnnnnnnnnnnnnnnnnnnnnnnnnnnnnnnnnnnnnnnnnnnnnnnnnnnnnnnnnnnnnnnnnnnnnnnnnnnnnnnnnnnnnnnnnnnnnnnnnnnnnnnnnnnnnnnnnnnnnnnnnnnnnnnnnnnnnnnnnnnnnnnnnnnnnnnnnnnnnnnnnnnnnnnnnnnnnnnnnnnnnnnnnnnnnnnnnnnnnnnnnnnnnnnnnnnnnnnnnnnnnnnnnnnnnnnnnnnnnnnnnnnnnnnnnnnnnnnnnnnnnnnnnnnnnnnnnnnnnnnnnnnnnnnnnnnnnnnnnnnnnnnnnnnnnnnnnnnnnnnnnnnnnnnnnnnnnnnnnnnnnnnnnnnnnnnnnnnnnnnnnnnnnnnnnnnnnnnnnnnnnnnnnnnnnnnnnnnnnnnnnnnnnnnnnnnnnnnnnnnnnnnnnnnnnnnnnnnnnnnnnnnnnnnnnnnnnnnnnnnnnnnnnnnnnnnnnnnnnnnnnnnnnnnnnnnnnnnnnnnnnnnnnnnnnnnnnnnnnnnnnnnnnnnnnnnnnnnnnnnnnnnnnnnnnnnnnnnnnnnnnnnnnnnnnnnnnnnnnnnnnnnnnnnnnnnnnnnnnnnnnnnnnnnnnnnnnnnnnnnnnnnnnnnnnnnnnnnnnnnnnnnnnnnnnnnnnnnnnnnnnnnnnnnnnnnnnnnnnnnnnnnnnnnnnnnnnnnnnnnnnnnnnnnnnnnnnnnnnnnnnnnnnnnnnnnnnnnnnnnnnnnnnnnnnnnnnnnnnnnnnnnnnnnnnnnnnnnnnnnnnnnnnnnnnnnnnnnnnnnnnnnnnnnnnnnnnnnnnnnnnnnnnnnnnnnnnnnnnnnnnnnnnnnnnnnnnnnnnnnnnnnnnnnnnnnnnnnnnnnnnnnnnnnnnnnnnnnnnnnnnnnnnnnnnnnnnnnnnnnnnnnnnnnnnnnnnnnnnnnnnnnnnnnnnnnnnnnnnnnnnnnnnnnnnnnnnnnnnnnnnnnnnnnnnnnnnnnnnnnnnnnnnnnnnnnnnnnnnnnnnnnnnnnnnnnnnnnnnnnnnnnnnnnnnnnnnnnnnnnnnnnnnnnnnnnnnnnnnnnnnnnnnnnnnnnnnnnnnnnnnnnnnnnnnnnnnnnnnnnnnnnnnnnnnnnnnnnnnnnnnnnnnnnnnnnnnnnnnnnnnnnnnnnnnnnnnnnnnnnnnnnnnnnnnnnnnnnnnnnnnnnnnnnnnnnnnnnnnnnnnnnnnnnnnnnnnnnnnnnnnnnnnnnnnnnnnnnnnnnnnnnnnnnnnnnnnnnnnnnnnnnnnnnnnnnnnnnnnnnnnnnnnnnnnnnnnnnnnnnnnnnnnnnnnnnnnnnnnnnnnnnnnnnnnnnnnnnnnnnnnnnnnnnnnnnnnnnnnnnnnnnnnnnnnnnnnnnnnnnnnnnnnnnnnnnnnnnnnnnnnnnnnnnnnnnnnnnnnnnnnnnnnnnnnnnnnnnnnnnnnnnnnnnnnnnnnnnnnnnnnnnnnnnnnnnnnnnnnnnnnnnnnnnnnnnnnnnnnnnnnnnnnnnnnnnnnnnnnnnnnnnnnnnnnnnnnnnnnnnnnnnnnnnnnnnnnnnnnnnnnnnnnnnnnnnnnnnnnnnnnnnnnnnnnnnnnnnnnnnnnnnnnnnnnnnnnnnnnnnnnnnnnnnnnnnnnnnnnnnnnnnnnnnnnnnnnnnnnnnnnnnnnnnnnnnnnnnnnnnnnnnnnnnnnnnnnnnnnnnnnnnnnnnnnnnnnnnnnnnnnnnnnnnnnnnnnnnnnnnnnnnnnnnnnnnnnnnnnnnnnnnnnnnnnnnnnnnnnnnnnnnnnnnnnnnnnnnnnnnnnnnnnnnnnnnnnnnnnnnnnnnnnnnnnnnnnnnnnnnnnnnnnnnnnnnnnnnnnnnnnnnnnnnnnnnnnnnnnnnnnnnnnnnnnnnnnnnnnnnnnnnnnnnnnnnnnnnnnnnnnnnnnnnnnnnnnnnnnnnnnnnnnnnnnnnnnnnnnnnnnnnnnnnnnnnnnnnnnnnnnnnnnnnnnnnnnnnnnnnnnnnnnnnnnnnnnnnnnnnnnnnnnnnnnnnnnnnnnnnnnnnnnnnnnnnnnnnnnnnnnnnnnnnnnnnnnnnnnnnnnnnnnnnnnnnnnnnnnnnnnnnnnnnnnnnnnnnnnnnnnnnnnnnnnnnnnnnnnnnnnnnnnnnnnnnnnnnnnnnnnnnnnnnnnnnnnnnnnnnnnnnnnnnnnnnnnnnnnnnnnnnnnnnnnnnnnnnnnnnnnnnnnnnnnnnnnnnnnnnnnnnnnnnnnnnnnnnnnnnnnnnnnnnnnnnnnnnnnnnnnnnnnnnnnnnnnnnnnnnnnnnnnnnnnnnnnnnnnnnnnnnnnnnnnnnnnnnnnnnnnnnnnnnnnnnnnnnnnnnnnnnnnnnnnnnnnnnnnnnnnnnnnnnnnnnnnnnnnnnnnnnnnnnnnnnnnnnnnnnnnnnnnnnnnnnnnnnnnnnnnnnnnnnnnnnnnnnnnnnnnnnnnnnnnnnnnnnnnnnnnnnnnnnnnnnnnnnnnnnnnnnnnnnnnnnnnnnnnnnnnnnnnnnnnnnnnnnnnnnnnnnnnnnnnnnnnnnnnnnnnnnnnnnnnnnnnnnnnnnnnnnnnnnnnnnnnnnnnnnnnnnnnnnnnnnnnnnnnnnnnnnnnnnnnnnnnnnnnnnnnnnnnnnnnnnnnnnnnnnnnnnnnnnnnnnnnnnnnnnnnnnnnnnnnnnnnnnnnnnnnnnnnnnnnnnnnnnnnnnnnnnnnnnnnnnnnnnnnnnnnnnnnnnnnnnnnnnnnnnnnnnnnnnnnnnnnnnnnnnnnnnnnnnnnnnnnnnnnnnnnnnnnnnnnnnnnnnnnnnnnnnnnnnnnnnnnnnnnnnnnnnnnnnnnnnnnnnnnnnnnnnnnnnnnnnnnnnnnnnnnnnnnnnnnnnnnnnnnnnnnnnnnnnnnnnnnnnnnnnnnnnnnnnnnnnnnnnnnnnnnnnnnnnnnnnnnnnnnnnnnnnnnnnnnnnnnnnnnnnnnnnnnnnnnnnnnnnnnnnnnnnnnnnnnnnnnnnnnnnnnnnnnnnnnnnnnnnnnnnnnnnnnnnnnnnnnnnnnnnnnnnnnnnnnnnnnnnnnnnnnnnnnnnnnnnnnnnnnnnnnnnnnnnnnnnnnnnnnnnnnnnnnnnnnnnnnnnnnnnnnnnnnnnnnnnnnnnnnnnnnnnnnnnnnnnnnnnnnnnnnnnnnnnnnnnnnnnnnnnnnnnnnnnnnnnnnnnnnnnnnnnnnnnnnnnnnnnnnnnnnnnnnnnnnnnnnnnnnnnnnnnnnnnnnnnnnnnnnnnnnnnnnnnnnnnnnnnnnnnnnnnnnnnnnnnnnnnnnnnnnnnnnnnnnnnnnnnnnnnnnnnnnnnnnnnnnnnnnnnnnnnnnnnnnnnnnnnnnnnnnnnnnnnnnnnnnnnnnnnnnnnnnnnnnnnnnnnnnnnnnnnnnnnnnnnnnnnnnnnnnnnnnnnnnnnnnnnnnnnnnnnnnnnnnnnnnnnnnnnnnnnnnnnnnnnnnnnnnnnnnnnnnnnnnnnnnnnnnnnnnnnnnnnnnnnnnnnnnnnnnnnnnnnnnnnnnnnnnnnnnnnnnnnnnnnnnnnnnnnnnnnnnnnnnnnnnnnnnnnnnnnnnnnnnnnnnnnnnnnnnnnnnnnnnnnnnnnnnnnnnnnnnnnnnnnnnnnnnnnnnnnnnnnnnnnnnnnnnnnnnnnnnnnnnnnnnnnnnnnnnnnnnnnnnnnnnnnnnnnnnnnnnnnnnnnnnnnnnnnnnnnnnnnnnnnnnnnnnnnnnnnnnnnnnnnnnnnnnnnnnnnnnnnnnnnnnnnnnnnnnnnnnnnnnnnnnnnnnnnnnnnnnnnnnnnnnnnnnnnnnnnnnnnnnnnnnnnnnnnnnnnnnnnnnnnnnnnnnnnnnnnnnnnnnnnnnnnnnnnnnnnnnnnnnnnnnnnnnnnnnnnnnnnnnnnnnnnnnnnnnnnnnnnnnnnnnnnnnnnnnnnnnnnnnnnnnnnnnnnnnnnnnnnnnnnnnnnnnnnnnnnnnnnnnnnnnnnnnnnnnnnnnnnnnnnnnnnnnnnnnnnnnnnnnnnnnnnnnnnnnnnnnnnnnnnnnnnnnnnnnnnnnnnnnnnnnnnnnnnnnnnnnnnnnnnnnnnnnnnnnnnnnnnnnnnnnnnnnnnnnnnnnnnnnnnnnnnnnnnnnnnnnnnnnnnnnnnnnnnnnnnnnnnnnnnnnnnnnnnnnnnnnnnnnnnnnnnnnnnnnnnnnnnnnnnnnnnnnnnnnnnnnnnnnnnnnnnnnnnnnnnnnnnnnnnnnnnnnnnnnnnnnnnnnnnnnnnnnnnnnnnnnnnnnnnnnnnnnnnnnnnnnnnnnnnnnnnnnnnnnnnnnnnnnnnnnnnnnnnnnnnnnnnnnnnnnnnnnnnnnnnnnnnnnnnnnnnnnnnnnnnnnnnnnnnnnnnnnnnnnnnnnnnnnnnnnnnnnnnnnnnnnnnnnnnnnnnnnnnnnnnnnnnnnnnnnnnnnnnnnnnnnnnnnnnnnnnnnnnnnnnnnnnnnnnnnnnnnnnnnnnnnnnnnnnnnnnnnnnnnnnnnnnnnnnnnnnnnnnnnnnnnnnnnnnnnnnnnnnnnnnnnnnnnnnnnnnnnnnnnnnnnnnnnnnnnnnnnnnnnnnnnnnnnnnnnnnnnnnnnnnnnnnnnnnnnnnnnnnnnnnnnnnnnnnnnnnnnnnnnnnnnnnnnnnnnnnnnnnnnnnnnnnnnnnnnnnnnnnnnnnnnnnnnnnnnnnnnnnnnnnnnnnnnnnnnnnnnnnnnnnnnnnnnnnnnnnnnnnnnnnnnnnnnnnnnnnnnnnnnnnnnnnnnnnnnnnnnnnnnnnnnnnnnnnnnnnnnnnnnnnnnnnnnnnnnnnnnnnnnnnnnnnnnnnnnnnnnnnnnnnnnnnnnnnnnnnnnnnnnnnnnnnnnnnnnnnnnnnnnnnnnnnnnnnnnnnnnnnnnnnnnnnnnnnnnnnnnnnnnnnnnnnnnnnnnnnnnnnnnnnnnnnnnnnnnnnnnnnnnnnnnnnnnnnnnnnnnnnnnnnnnnnnnnnnnnnnnnnnnnnnnnnnnnnnnnnnnnnnnnnnnnnnnnnnnnnnnnnnnnnnnnnnnnnnnnnnnnnnnnnnnnnnnnnnnnnnnnnnnnnnnnnnnnnnnnnnnnnnnnnnnnnnnnnnnnnnnnnnnnnnnnnnnnnnnnnnnnnnnnnnnnnnnnnnnnnnnnnnnnnnnnnnnnnnnnnnnnnnnnnnnnnnnnnnnnnnnnnnnnnnnnnnnnnnnnnnnnnnnnnnnnnnnnnnnnnnnnnnnnnnnnnnnnnnnnnnnnnnnnnnnnnnnnnnnnnnnnnnnnnnnnnnnnnnnnnnnnnnnnnnnnnnnnnnnnnnnnnnnnnnnnnnnnnnnnnnnnnnnnnnnnnnnnnnnnnnnnnnnnnnnnnnnnnnnnnnnnnnnnnnnnnnnnnnnnnnnnnnnnnnnnnnnnnnnnnnnnnnnnnnnnnnnnnnnnnnnnnnnnnnnnnnnnnnnnnnnnnnnnnnnnnnnnnnnnnnnnnnnnnnnnnnnnnnnnnnnnnnnnnnnnnnnnnnnnnnnnnnnnnnnnnnnnnnnnnnnnnnnnnnnnnnnnnnnnnnnnnnnnnnnnnnnnnnnnnnnnnnnnnnnnnnnnnnnnnnnnnnnnnnnnnnnnnnnnnnnnnnnnnnnnnnnnnnnnnnnnnnnnnnnnnnnnnnnnnnnnnnnnnnnnnnnnnnnnnnnnnnnnnnnnnnnnnnnnnnnnnnnnnnnnnnnnnnnnnnnnnnnnnnnnnnnnnnnnnnnnnnnnnnnnnnnnnnnnnnnnnnnnnnnnnnnnnnnnnnnnnnnnnnnnnnnnnnnnnnnnnnnnnnnnnnnnnnnnnnnnnnnnnnnnnnnnnnnnnnnnnnnnnnnnnnnnnnnnnnnnnnnnnnnnnnnnnnnnnnnnnnnnnnnnnnnnnnnnnnnnnnnnnnnnnnnnnnnnnnnnnnnnnnnnnnnnnnnnnnnnnnnnnnnnnnnnnnnnnnnnnnnnnnnnnnnnnnnnnnnnnnnnnnnnnnnnnnnnnnnnnnnnnnnnnnnnnnnnnnnnnnnnnnnnnnnnnnnnnnnnnnnnnnnnnnnnnnnnnnnnnnnnnnnnnnnnnnnnnnnnnnnnnnnnnnnnnnnnnnnnnnnnnnnnnnnnnnnnnnnnnnnnnnnnnnnnnnnnnnnnnnnnnnnnnnnnnnnnnnnnnnnnnnnnnnnnnnnnnnnnnnnnnnnnnnnnnnnnnnnnnnnnnnnnnnnnnnnnnnnnnnnnnnnnnnnnnnnnnnnnnnnnnnnnnnnnnnnnnnnnnnnnnnnnnnnnnnnnnnnnnnnnnnnnnnnnnnnnnnnnnnnnnnnnnnnnnnnnnnnnnnnnnnnnnnnnnnnnnnnnnnnnnnnnnnnnnnnnnnnnnnnnnnnnnnnnnnnnnnnnnnnnnnnnnnnnnnnnnnnnnnnnnnnnnnnnnnnnnnnnnnnnnnnnnnnnnnnnnnnnnnnnnnnnnnnnnnnnnnnnnnnnnnnnnnnnnnnnnnnnnnnnnnnnnnnnnnnnnnnnnnnnnnnnnnnnnnnnnnnnnnnnnnnnnnnnnnnnnnnnnnnnnnnnnnnnnnnnnnnnnnnnnnnnnnnnnnnnnnnnnnnnnnnnnnnnnnnnnnnnnnnnnnnnnnnnnnnnnnnnnnnnnnnnnnnnnnnnnnnnnnnnnnnnnnnnnnnnnnnnnnnnnnnnnnnnnnnnnnnnnnnnnnnnnnnnnnnnnnnnnnnnnnnnnnnnnnnnnnnnnnnnnnnnnnnnnnnnnnnnnnnnnnnnnnnnnnnnnnnnnnnnnnnnnnnnnnnnnnnnnnnnnnnnnnnnnnnnnnnnnnnnnnnnnnnnnnnnnnnnnnnnnnnnnnnnnnnnnnnnnnnnnnnnnnnnnnnnnnnnnnnnnnnnnnnnnnnnnnnnnnnnnnnnnnnnnnnnnnnnnnnnnnnnnnnnnnnnnnnnnnnnnnnnnnnnnnnnnnnnnnnnnnnnnnnnnnnnnnnnnnnnnnnnnnnnnnnnnnnnnnnnnnnnnnnnnnnnnnnnnnnnnnnnnnnnnnnnnnnnnnnnnnnnnnnnnnnnnnnnnnnnnnnnnnnnnnnnnnnnnnnnnnnnnnnnnnnnnnnnnnnnnnnnnnnnnnnnnnnnnnnnnnnnnnnnnnnnnnnnnnnnnnnnnnnnnnnnnnnnnnnnnnnnnnnnnnnnnnnnnnnnnnnnnnnnnnnnnnnnnnnnnnnnnnnnnnnnnnnnnnnnnnnnnnnnnnnnnnnnnnnnnnnnnnnnnnnnnnnnnnnnnnnnnnnnnnnnnnnnnnnnnnnnnnnnnnnnnnnnnnnnnnnnnnnnnnnnnnnnnnnnnnnnnnnnnnnnnnnnnnnnnnnnnnnnnnnnnnnnnnnnnnnnnnnnnnnnnnnnnnnnnnnnnnnnnnnnnnnnnnnnnnnnnnnnnnnnnnnnnnnnnnnnnnnnnnnnnnnnnnnnnnnnnnnnnnnnnnnnnnnnnnnnnnnnnnnnnnnnnnnnnnnnnnnnnnnnnnnnnnnnnnnnnnnnnnnnnnnnnnnnnnnnnnnnnnnnnnnnnnnnnnnnnnnnnnnnnnnnnnnnnnnnnnnnnnnnnnnnnnnnnnnnnnnnnnnnnnnnnnnnnnnnnnnnnnnnnnnnnnnnnnnnnnnnnnnnnnnnnnnnnnnnnnnnnnnnnnnnnnnnnnnnnnnnnnnnnnnnnnnnnnnnnnnnnnnnnnnnnnnnnnnnnnnnnnnnnnnnnnnnnnnnnnnnnnnnnnnnnnnnnnnnnnnnnnnnnnnnnnnnnnnnnnnnnnnnnnnnnnnnnnnnnnnnnnnnnnnnnnnnnnnnnnnnnnnnnnnnnnnnnnnnnnnnnnnnnnnnnnnnnnnnnnnnnnnnnnnnnnnnnnnnnnnnnnnnnnnnnnnnnnnnnnnnnnnnnnnnnnnnnnnnnnnnnnnnnnnnnnnnnnnnnnnnnnnnnnnnnnnnnnnnnnnnnnnnnnnnnnnnnnnnnnnnnnnnnnnnnnnnnnnnnnnnnnnnnnnnnnnnnnnnnnnnnnnnnnnnnnnnnnnnnnnnnnnnnnnnnnnnnnnnnnnnnnnnnnnnnnnnnnnnnnnnnnnnnnnnnnnnnnnnnnnnnnnnnnnnnnnnnnnnnnnnnnnnnnnnnnnnnnnnnnnnnnnnnnnnnnnnnnnnnnnnnnnnnnnnnnnnnnnnnnnnnnnnnnnnnnnnnnnnnnnnnnnnnnnnnnnnnnnnnnnnnnnnnnnnnnnnnnnnnnnnnnnnnnnnnnnnnnnnnnnnnnnnnnnnnnnnnnnnnnnnnnnnnnnnnnnnnnnnnnnnnnnnnnnnnnnnnnnnnnnnnnnnnnnnnnnnnnnnnnnnnnnnnnnnnnnnnnnnnnnnnnnnnnnnnnnnnnnnnnnnnnnnnnnnnnnnnnnnnnnnnnnnnnnnnnnnnnnnnnnnnnnnnnnnnnnnnnnnnnnnnnnnnnnnnnnnnnnnnnnnnnnnnnnnnnnnnnnnnnnnnnnnnnnnnnnnnnnnnnnnnnnnnnnnnnnnnnnnnnnnnnnnnnnnnnnnnnnnnnnnnnnnnnnnnnnnnnnnnnnnnnnnnnnnnnnnnnnnnnnnnnnnnnnnnnnnnnnnnnnnnnnnnnnnnnnnnnnnnnnnnnnnnnnnnnnnnnnnnnnnnnnnnnnnnnnnnnnnnnnnnnnnnnnnnnnnnnnnnnnnnnnnnnnnnnnnnnnnnnnnnnnnnnnnnnnnnnnnnnnnnnnnnnnnnnnnnnnnnnnnnnnnnnnnnnnnnnnnnnnnnnnnnnnnnnnnnnnnnnnnnnnnnnnnnnnnnnnnnnnnnnnnnnnnnnnnnnnnnnnnnnnnnnnnnnnnnnnnnnnnnnnnnnnnnnnnnnnnnnnnnnnnnnnnnnnnnnnnnnnnnnnnnnnnnnnnnnnnnnnnnnnnnnnnnnnnnnnnnnnnnnnnnnnnnnnnnnnnnnnnnnnnnnnnnnnnnnnnnnnnnnnnnnnnnnnnnnnnnnnnnnnnnnnnnnnnnnnnnnnnnnnnnnnnnnnnnnnnnnnnnnnnnnnnnnnnnnnnnnnnnnnnnnnnnnnnnnnnnnnnnnnnnnnnnnnnnnnnnnnnnnnnnnnnnnnnnnnnnnnnnnnnnnnnnnnnnnnnnnnnnnnnnnnnnnnnnnnnnnnnnnnnnnnnnnnnnnnnnnnnnnnnnnnnnnnnnnnnnnnnnnnnnnnnnnnnnnnnnnnnnnnnnnnnnnnnnnnnnnnnnnnnnnnnnnnnnnnnnnnnnnnnnnnnnnnnnnnnnnnnnnnnnnnnnnnnnnnnnnnnnnnnnnnnnnnnnnnnnnnnnnnnnnnnnnnnnnnnnnnnnnnnnnnnnnnnnnnnnnnnnnnnnnnnnnnnnnnnnnnnnnnnnnnnnnnnnnnnnnnnnnnnnnnnnnnnnnnnnnnnnnnnnnnnnnnnnnnnnnnnnnnnnnnnnnnnnnnnnnnnnnnnnnnnnnnnnnnnnnnnnnnnnnnnnnnnnnnnnnnnnnnnnnnnnnnnnnnnnnnnnnnnnnnnnnnnnnnnnnnnnnnnnnnnnnnnnnnnnnnnnnnnnnnnnnnnnnnnnnnnnnnnnnnnnnnnnnnnnnnnnnnnnnnnnnnnnnnnnnnnnnnnnnnnnnnnnnnnnnnnnnnnnnnnnnnnnnnnnnnnnnnnnnnnnnnnnnnnnnnnnnnnnnnnnnnnnnnnnnnnnnnnnnnnnnnnnnnnnnnnnnnnnnnnnnnnnnnnnnnnnnnnnnnnnnnnnnnnnnnnnnnnnnnnnnnnnnnnnnnnnnnnnnnnnnnnnnnnnnnnnnnnnnnnnnnnnnnnnnnnnnnnnnnnnnnnnnnnnnnnnnnnnnnnnnnnnnnnnnnnnnnnnnnnnnnnnnnnnnnnnnnnnnnnnnnnnnnnnnnnnnnnnnnnnnnnnnnnnnnnnnnnnnnnnnnnnnnnnnnnnnnnnnnnnnnnnnnnnnnnnnnnnnnnnnnnnnnnnnnnnnnnnnnnnnnnnnnnnnnnnnnnnnnnnnnnnnnnnnnnnnnnnnnnnnnnnnnnnnnnnnnnnnnnnnnnnnnnnnnnnnnnnnnnnnnnnnnnnnnnnnnnnnnnnnnnnnnnnnnnnnnnnnnnnnnnnnnnnnnnnnnnnnnnnnnnnnnnnnnnnnnnnnnnnnnnnnnnnnnnnnnnnnnnnnnnnnnnnnnnnnnnnnnnnnnnnnnnnnnnnnnnnnnnnnnnnnnnnnnnnnnnnnnnnnnnnnnnnnnnnnnnnnnnnnnnnnnnnnnnnnnnnnnnnnnnnnnnnnnnnnnnnnnnnnnnnnnnnnnnnnnnnnnnnnnnnnnnnnnnnnnnnnnnnnnnnnnnnnnnnnnnnnnnnnnnnnnnnnnnnnnnnnnnnnnnnnnnnnnnnnnnnnnnnnnnnnnnnnnnnnnnnnnnnnnnnnnnnnnnnnnnnnnnnnnnnnnnnnnnnnnnnnnnnnnnnnnnnnnnnnnnnnnnnnnnnnnnnnnnnnnnnnnnnnnnnnnnnnnnnnnnnnnnnnnnnnnnnnnnnnnnnnnnnnnnnnnnnnnnnnnnnnnnnnnnnnnnnnnnnnnnnnnnnnnnnnnnnnnnnnnnnnnnnnnnnnnnnnnnnnnnnnnnnnnnnnnnnnnnnnnnnnnnnnnnnnnnnnnnnnnnnnnnnnnnnnnnnnnnnnnnnnnnnnnnnnnnnnnnnnnnnnnnnnnnnnnnnnnnnnnnnnnnnnnnnnnnnnnnnnnnnnnnnnnnnnnnnnnnnnnnnnnnnnnnnnnnnnnnnnnnnnnnnnnnnnnnnnnnnnnnnnnnnnnnnnnnnnnnnnnnnnnnnnnnnnnnnnnnnnnnnnnnnnnnnnnnnnnnnnnnnnnnnnnnnnnnnnnnnnnnnnnnnnnnnnnnnnnnnnnnnnnnnnnnnnnnnnnnnnnnnnnnnnnnnnnnnnnnnnnnnnnnnnnnnnnnnnnnnnnnnnnnnnnnnnnnnnnnnnnnnnnnnnnnnnnnnnnnnnnnnnnnnnnnnnnnnnnnnnnnnnnnnnnnnnnnnnnnnnnnnnnnnnnnnnnnnnnnnnnnnnnnnnnnnnnnnnnnnnnnnnnnnnnnnnnnnnnnnnnnnnnnnnnnnnnnnnnnnnnnnnnnnnnnnnnnnnnnnnnnnnnnnnnnnnnnnnnnnnnnnnnnnnnnnnnnnnnnnnnnnnnnnnnnnnnnnnnnnnnnnnnnnnnnnnnnnnnnnnnnnnnnnnnnnnnnnnnnnnnnnnnnnnnnnnnnnnnnnnnnnnnnnnnnnnnnnnnnnnnnnnnnnnnnnnnnnnnnnnnnnnnnnnnnnnnnnnnnnnnnnnnnnnnnnnnnnnnnnnnnnnnnnnnnnnnnnnnnnnnnnnnnnnnnnnnnnnnnnnnnnnnnnnnnnnnnnnnnnnnnnnnnnnnnnnnnnnnnnnnnnnnnnnnnnnnnnnnnnnnnnnnnnnnnnnnnnnnnnnnnnnnnnnnnnnnnnnnnnnnnnnnnnnnnnnnnnnnnnnnnnnnnnnnnnnnnnnnnnnnnnnnnnnnnnnnnnnnnnnnnnnnnnnnnnnnnnnnnnnnnnnnnnnnnnnnnnnnnnnnnnnnnnnnnnnnnnnnnnnnnnnnnnnnnnnnnnnnnnnnnnnnnnnnnnnnnnnnnnnnnnnnnnnnnnnnnnnnnnnnnnnnnnnnnnnnnnnnnnnnnnnnnnnnnnnnnnnnnnnnnnnnnnnnnnnnnnnnnnnnnnnnnnnnnnnnnnnnnnnnnnnnnnnnnnnnnnnnnnnnnnnnnnnnnnnnnnnnnnnnnnnnnnnnnnnnnnnnnnnnnnnnnnnnnnnnnnnnnnnnnnnnnnnnnnnnnnnnnnnnnnnnnnnnnnnnnnnnnnnnnnnnnnnnnnnnnnnnnnnnnnnnnnnnnnnnnnnnnnnnnnnnnnnnnnnnnnnnnnnnnnnnnnnnnnnnnnnnnnnnnnnnnnnnnnnnnnnnnnnnnnnnnnnnnnnnnnnnnnnnnnnnnnnnnnnnnnnnnnnnnnnnnnnnnnnnnnnnnnnnnnnnnnnnnnnnnnnnnnnnnnnnnnnnnnnnnnnnnnnnnnnnnnnnnnnnnnnnnnnnnnnnnnnnnnnnnnnnnnnnnnnnnnnnnnnnnnnnnnnnnnnnnnnnnnnnnnnnnnnnnnnnnnnnnnnnnnnnnnnnnnnnnnnnnnnnnnnnnnnnnnnnnnnnnnnnnnnnnnnnnnnnnnnnnnnnnnnnnnnnnnnnnnnnnnnnnnnnnnnnnnnnnnnnnnnnnnnnnnnnnnnnnnnnnnnnnnnnnnnnnnnnnnnnnnnnnnnnnnnnnnnnnnnnnnnnnnnnnnnnnnnnnnnnnnnnnnnnnnnnnnnnnnnnnnnnnnnnnnnnnnnnnnnnnnnnnnnnnnnnnnnnnnnnnnnnnnnnnnnnnnnnnnnnnnnnnnnnnnnnnnnnnnnnnnnnnnnnnnnnnnnnnnnnnnnnnnnnnnnnnnnnnnnnnnnnnnnnnnnnnnnnnnnnnnnnnnnnnnnnnnnnnnnnnnnnnnnnnnnnnnnnnnnnnnnnnnnnnnnnnnnnnnnnnnnnnnnnnnnnnnnnnnnnnnnnnnnnnnnnnnnnnnnnnnnnnnnnnnnnnnnnnnnnnnnnnnnnnnnnnnnnnnnnnnnnnnnnnnnnnnnnnnnnnnnnnnnnnnnnnnnnnnnnnnnnnnnnnnnnnnnnnnnnnnnnnnnnnnnnnnnnnnnnnnnnnnnnnnnnnnnnnnnnnnnnnnnnnnnnnnnnnnnnnnnnnnnnnnnnnnnnnnnnnnnnnnnnnnnnnnnnnnnnnnnnnnnnnnnnnnnnnnnnnnnnnnnnnnnnnnnnnnnnnnnnnnnnnnnnnnnnnnnnnnnnnnnnnnnnnnnnnnnnnnnnnnnnnnnnnnnnnnnnnnnnnnnnnnnnnnnnnnnnnnnnnnnnnnnnnnnnnnnnnnnnnnnnnnnnnnnnnnnnnnnnnnnnnnnnnnnnnnnnnnnnnnnnnnnnnnnnnnnnnnnnnnnnnnnnnnnnnnnnnnnnnnnnnnnnnnnnnnnnnnnnnnnnnnnnnnnnnnnnnnnnnnnnnnnnnnnnnnnnnnnnnnnnnnnnnnnnnnnnnnnnnnnnnnnnnnnnnnnnnnnnnnnnnnnnnnnnnnnnnnnnnnnnnnnnnnnnnnnnnnnnnnnnnnnnnnnnnnnnnnnnnnnnnnnnnnnnnnnnnnnnnnnnnnnnnnnnnnnnnnnnnnnnnnnnnnnnnnnnnnnnnnnnnnnnnnnnnnnnnnnnnnnnnnnnnnnnnnnnnnnnnnnnnnnnnnnnnnnnnnnnnnnnnnnnnnnnnnnnnnnnnnnnnnnnnnnnnnnnnnnnnnnnnnnnnnnnnnnnnnnnnnnnnnnnnnnnnnnnnnnnnnnnnnnnnnnnnnnnnnnnnnnnnnnnnnnnnnnnnnnnnnnnnnnnnnnnnnnnnnnnnnnnnnnnnnnnnnnnnnnnnnnnnnnnnnnnnnnnnnnnnnnnnnnnnnnnnnnnnnnnnnnnnnnnnnnnnnnnnnnnnnnnnnnnnnnnnnnnnnnnnnnnnnnnnnnnnnnnnnnnnnnnnnnnnnnnnnnnnnnnnnnnnnnnnnnnnnnnnnnnnnnnnnnnnnnnnnnnnnnnnnnnnnnnnnnnnnnnnnnnnnnnnnnnnnnnnnnnnnnnnnnnnnnnnnnnnnnnnnnnnnnnnnnnnnnnnnnnnnnnnnnnnnnnnnnnnnnnnnnnnnnnnnnnnnnnnnnnnnnnnnnnnnnnnnnnnnnnnnnnnnnnnnnnnnnnnnnnnnnnnnnnnnnnnnnnnnnnnnnnnnnnnnnnnnnnnnnnnnnnnnnnnnnnnnnnnnnnnnnnnnnnnnnnnnnnnnnnnnnnnnnnnnnnnnnnnnnnnnnnnnnnnnnnnnnnnnnnnnnnnnnnnnnnnnnnnnnnnnnnnnnnnnnnnnnnnnnnnnnnnnnnnnnnnnnnnnnnnnnnnnnnnnnnnnnnnnnnnnnnnnnnnnnnnnnnnnnnnnnnnnnnnnnnnnnnnnnnnnnnnnnnnnnnnnnnnnnnnnnnnnnnnnnnnnnnnnnnnnnnnnnnnnnnnnnnnnnnnnnnnnnnnnnnnnnnnnnnnnnnnnnnnnnnnnnnnnnnnnnnnnnnnnnnnnnnnnnnnnnnnnnnnnnnnnnnnnnnnnnnnnnnnnnnnnnnnnnnnnnnnnnnnnnnnnnnnnnnnnnnnnnnnnnnnnnnnnnnnnnnnnnnnnnnnnnnnnnnnnnnnnnnnnnnnnnnnnnnnnnnnnnnnnnnnnnnnnnnnnnnnnnnnnnnnnnnnnnnnnnnnnnnnnnnnnnnnnnnnnnnnnnnnnnnnnnnnnnnnnnnnnnnnnnnnnnnnnnnnnnnnnnnnnnnnnnnnnnnnnnnnnnnnnnnnnnnnnnnnnnnnnnnnnnnnnnnnnnnnnnnnnnnnnnnnnnnnnnnnnnnnnnnnnnnnnnnnnnnnnnnnnnnnnnnnnnnnnnnnnnnnnnnnnnnnnnnnnnnnnnnnnnnnnnnnnnnnnnnnnnnnnnnnnnnnnnnnnnnnnnnnnnnnnnnnnnnnnnnnnnnnnnnnnnnnnnnnnnnnnnnnnnnnnnnnnnnnnnnnnnnnnnnnnnnnnnnnnnnnnnnnnnnnnnnnnnnnnnnnnnnnnnnnnnnnnnnnnnnnnnnnnnnnnnnnnnnnnnnnnnnnnnnnnnnnnnnnnnnnnnnnnnnnnnnnnnnnnnnnnnnnnnnnnnnnnnnnnnnnnnnnnnnnnnnnnnnnnnnnnnnnnnnnnnnnnnnnnnnnnnnnnnnnnnnnnnnnnnnnnnnnnnnnnnnnnnnnnnnnnnnnnnnnnnnnnnnnnnnnnnnnnnnnnnnnnnnnnnnnnnnnnnnnnnnnnnnnnnnnnnnnnnnnnnnnnnnnnnnnnnnnnnnnnnnnnnnnnnnnnnnnnnnnnnnnnnnnnnnnnnnnnnnnnnnnnnnnnnnnnnnnnnnnnnnnnnnnnnnnnnnnnnnnnnnnnnnnnnnnnnnnnnnnnnnnnnnnnnnnnnnnnnnnnnnnnnnnnnnnnnnnnnnnnnnnnnnnnnnnnnnnnnnnnnnnnnnnnnnnnnnnnnnnnnnnnnnnnnnnnnnnnnnnnnnnnnnnnnnnnnnnnnnnnnnnnnnnnnnnnnnnnnnnnnnnnnnnnnnnnnnnnnnnnnnnnnnnnnnnnnnnnnnnnnnnnnnnnnnnnnnnnnnnnnnnnnnnnnnnnnnnnnnnnnnnnnnnnnnnnnnnnnnnnnnnnnnnnnnnnnnnnnnnnnnnnnnnnnnnnnnnnnnnnnnnnnnnnnnnnnnnnnnnnnnnnnnnnnnnnnnnnnnnnnnnnnnnnnnnnnnnnnnnnnnnnnnnnnnnnnnnnnnnnnnnnnnnnnnnnnnnnnnnnnnnnnnnnnnnnnnnnnnnnnnnnnnnnnnnnnnnnnnnnnnnnnnnnnnnnnnnnnnnnnnnnnnnnnnnnnnnnnnnnnnnnnnnnnnnnnnnnnnnnnnnnnnnnnnnnnnnnnnnnnnnnnnnnnnnnnnnnnnnnnnnnnnnnnnnnnnnnnnnnnnnnnnnnnnnnnnnnnnnnnnnnnnnnnnnnnnnnnnnnnnnnnnnnnnnnnnnnnnnnnnnnnnnnnnnnnnnnnnnnnnnnnnnnnnnnnnnnnnnnnnnnnnnnnnnnnnnnnnnnnnnnnnnnnnnnnnnnnnnnnnnnnnnnnnnnnnnnnnnnnnnnnnnnnnnnnnnnnnnnnnnnnnnnnnnnnnnnnnnnnnnnnnnnnnnnnnnnnnnnnnnnnnnnnnnnnnnnnnnnnnnnnnnnnnnnnnnnnnnnnnnnnnnnnnnnnnnnnnnnnnnnnnnnnnnnnnnnnnnnnnnnnnnnnnnnnnnnnnnnnnnnnnnnnnnnnnnnnnnnnnnnnnnnnnnnnnnnnnnnnnnnnnnnnnnnnnnnnnnnnnnnnnnnnnnnnnnnnnnnnnnnnnnnnnnnnnnnnnnnnnnnnnnnnnnnnnnnnnnnnnnnnnnnnnnnnnnnnnnnnnnnnnnnnnnnnnnnnnnnnnnnnnnnnnnnnnnnnnnnnnnnnnnnnnnnnnnnnnnnnnnnnnnnnnnnnnnnnnnnnnnnnnnnnnnnnnnnnnnnnnnnnnnnnnnnnnnnnnnnnnnnnnnnnnnnnnnnnnnnnnnnnnnnnnnnnnnnnnnnnnnnnnnnnnnnnnnnnnnnnnnnnnnnnnnnnnnnnnnnnnnnnnnnnnnnnnnnnnnnnnnnnnnnnnnnnnnnnnnnnnnnnnnnnnnnnnnnnnnnnnnnnnnnnnnnnnnnnnnnnnnnnnnnnnnnnnnnnnnnnnnnnnnnnnnnnnnnnnnnnnnnnnnnnnnnnnnnnnnnnnnnnnnnnnnnnnnnnnnnnnnnnnnnnnnnnnnnnnnnnnnnnnnnnnnnnnnnnnnnnnnnnnnnnnnnnnnnnnnnnnnnnnnnnnnnnnnnnnnnnnnnnnnnnnnnnnnnnnnnnnnnnnnnnnnnnnnnnnnnnnnnnnnnnnnnnnnnnnnnnnnnnnnnnnnnnnnnnnnnnnnnnnnnnnnnnnnnnnnnnnnnnnnnnnnnnnnnnnnnnnnnnnnnnnnnnnnnnnnnnnnnnnnnnnnnnnnnnnnnnnnnnnnnnnnnnnnnnnnnnnnnnnnnnnnnnnnnnnnnnnnnnnnnnnnnnnnnnnnnnnnnnnnnnnnnnnnnnnnnnnnnnnnnnnnnnnnnnnnnnnnnnnnnnnnnnnnnnnnnnnnnnnnnnnnnnnnnnnnnnnnnnnnnnnnnnnnnnnnnnnnnnnnnnnnnnnnnnnnnnnnnnnnnnnnnnnnnnnnnnnnnnnnnnnnnnnnnnnnnnnnnnnnnnnnnnnnnnnnnnnnnnnnnnnnnnnnnnnnnnnnnnnnnnnnnnnnnnnnnnnnnnnnnnnnnnnnnnnnnnnnnnnnnnnnnnnnnnnnnnnnnnnnnnnnnnnnnnnnnnnnnnnnnnnnnnnnnnnnnnnnnnnnnnnnnnnnnnnnnnnnnnnnnnnnnnnnnnnnnnnnnnnnnnnnnnnnnnnnnnnnnnnnnnnnnnnnnnnnnnnnnnnnnnnnnnnnnnnnnnnnnnnnnnnnnnnnnnnnnnnnnnnnnnnnnnnnnnnnnnnnnnnnnnnnnnnnnnnnnnnnnnnnnnnnnnnnnnnnnnnnnnnnnnnnnnnnnnnnnnnnnnnnnnnnnnnnnnnnnnnnnnnnnnnnnnnnnnnnnnnnnnnnnnnnnnnnnnnnnnnnnnnnnnnnnnnnnnnnnnnnnnnnnnnnnnnnnnnnnnnnnnnnnnnnnnnnnnnnnnnnnnnnnnnnnnnnnnnnnnnnnnnnnnnnnnnnnnnnnnnnnnnnnnnnnnnnnnnnnnnnnnnnnnnnnnnnnnnnnnnnnnnnnnnnnnnnnnnnnnnnnnnnnnnnnnnnnnnnnnnnnnnnnnnnnnnnnnnnnnnnnnnnnnnnnnnnnnnnnnnnnnnnnnnnnnnnnnnnnnnnnnnnnnnnnnnnnnnnnnnnnnnnnnnnnnnnnnnnnnnnnnnnnnnnnnnnnnnnnnnnnnnnnnnnnnnnnnnnnnnnnnnnnnnnnnnnnnnnnnnnnnnnnnnnnnnnnnnnnnnnnnnnnnnnnnnnnnnnnnnnnnnnnnnnnnnnnnnnnnnnnnnnnnnnnnnnnnnnnnnnnnnnnnnnnnnnnnnnnnnnnnnnnnnnnnnnnnnnnnnnnnnnnnnnnnnnnnnnnnnnnnnnnnnnnnnnnnnnnnnnnnnnnnnnnnnnnnnnnnnnnnnnnnnnnnnnnnnnnnnnnnnnnnnnnnnnnnnnnnnnnnnnnnnnnnnnnnnnnnnnnnnnnnnnnnnnnnnnnnnnnnnnnnnnnnnnnnnnnnnnnnnnnnnnnnnnnnnnnnnnnnnnnnnnnnnnnnnnnnnnnnnnnnnnnnnnnnnnnnnnnnnnnnnnnnnnnnnnnnnnnnnnnnnnnnnnnnnnnnnnnnnnnnnnnnnnnnnnnnnnnnnnnnnnnnnnnnnnnnnnnnnnnnnnnnnnnnnnnnnnnnnnnnnnnnnnnnnnnnnnnnnnnnnnnnnnnnnnnnnnnnnnnnnnnnnnnnnnnnnnnnnnnnnnnnnnnnnnnnnnnnnnnnnnnnnnnnnnnnnnnnnnnnnnnnnnnnnnnnnnnnnnnnnnnnnnnnnnnnnnnnnnnnnnnnnnnnnnnnnnnnnnnnnnnnnnnnnnnnnnnnnnnnnnnnnnnnnnnnnnnnnnnnnnnnnnnnnnnnnnnnnnnnnnnnnnnnnnnnnnnnnnnnnnnnnnnnnnnnnnnnnnnnnnnnnnnnnnnnnnnnnnnnnnnnnnnnnnnnnnnnnnnnnnnnnnnnnnnnnnnnnnnnnnnnnnnnnnnnnnnnnnnnnnnnnnnnnnnnnnnnnnnnnnnnnnnnnnnnnnnnnnnnnnnnnnnnnnnnnnnnnnnnnnnnnnnnnnnnnnnnnnnnnnnnnnnnnnnnnnnnnnnnnnnnnnnnnnnnnnnnnnnnnnnnnnnnnnnnnnnnnnnnnnnnnnnnnnnnnnnnnnnnnnnnnnnnnnnnnnnnnnnnnnnnnnnnnnnnnnnnnnnnnnnnnnnnnnnnnnnnnnnnnnnnnnnnnnnnnnnnnnnnnnnnnnnnnnnnnnnnnnnnnnnnnnnnnnnnnnnnnnnnnnnnnnnnnnnnnnnnnnnnnnnnnnnnnnnnnnnnnnnnnnnnnnnnnnnnnnnnnnnnnnnnnnnnnnnnnnnnnnnnnnnnnnnnnnnnnnnnnnnnnnnnnnnnnnnnnnnnnnnnnnnnnnnnnnnnnnnnnnnnnnnnnnnnnnnnnnnnnnnnnnnnnnnnnnnnnnnnnnnnnnnnnnnnnnnnnnnnnnnnnnnnnnnnnnnnnnnnnnnnnnnnnnnnnnnnnnnnnnnnnnnnnnnnnnnnnnnnnnnnnnnnnnnnnnnnnnnnnnnnnnnnnnnnnnnnnnnnnnnnnnnnnnnnnnnnnnnnnnnnnnnnnnnnnnnnnnnnnnnnnnnnnnnnnnnnnnnnnnnnnnnnnnnnnnnnnnnnnnnnnnnnnnnnnnnnnnnnnnnnnnnnnnnnnnnnnnnnnnnnnnnnnnnnnnnnnnnnnnnnnnnnnnnnnnnnnnnnnnnnnnnnnnnnnnnnnnnnnnnnnnnnnnnnnnnnnnnnnnnnnnnnnnnnnnnnnnnnnnnnnnnnnnnnnnnnnnnnnnnnnnnnnnnnnnnnnnnnnnnnnnnnnnnnnnnnnnnnnnnnnnnnnnnnnnnnnnnnnnnnnnnnnnnnnnnnnnnnnnnnnnnnnnnnnnnnnnnnnnnnnnnnnnnnnnnnnnnnnnnnnnnnnnnnnnnnnnnnnnnnnnnnnnnnnnnnnnnnnnnnnnnnnnnnnnnnnnnnnnnnnnnnnnnnnnnnnnnnnnnnnnnnnnnnnnnnnnnnnnnnnnnnnnnnnnnnnnnnnnnnnnnnnnnnnnnnnnnnnnnnnnnnnnnnnnnnnnnnnnnnnnnnnnnnnnnnnnnnnnnnnnnnnnnnnnnnnnnnnnnnnnnnnnnnnnnnnnnnnnnnnnnnnnnnnnnnnnnnnnnnnnnnnnnnnnnnnnnnnnnnnnnnnnnnnnnnnnnnnnnnnnnnnnnnnnnnnnnnnnnnnnnnnnnnnnnnnnnnnnnnnnnnnnnnnnnnnnnnnnnnnnnnnnnnnnnnnnnnnnnnnnnnnnnnnnnnnnnnnnnnnnnnnnnnnnnnnnnnnnnnnnnnnnnnnnnnnnnnnnnnnnnnnnnnnnnnnnnnnnnnnnnnnnnnnnnnnnnnnnnnnnnnnnnnnnnnnnnnnnnnnnnnnnnnnnnnnnnnnnnnnnnnnnnnnnnnnnnnnnnnnnnnnnnnnnnnnnnnnnnnnnnnnnnnnnnnnnnnnnnnnnnnnnnnnnnnnnnnnnnnnnnnnnnnnnnnnnnnnnnnnnnnnnnnnnnnnnnnnnnnnnnnnnnnnnnnnnnnnnnnnnnnnnnnnnnnnnnnnnnnnnnnnnnnnnnnnnnnnnnnnnnnnnnnnnnnnnnnnnnnnnnnnnnnnnnnnnnnnnnnnnnnnnnnnnnnnnnnnnnnnnnnnnnnnnnnnnnnnnnnnnnnnnnnnnnnnnnnnnnnnnnnnnnnnnnnnnnnnnnnnnnnnnnnnnnnnnnnnnnnnnnnnnnnnnnnnnnnnnnnnnnnnnnnnnnnnnnnnnnnnnnnnnnnnnnnnnnnnnnnnnnnnnnnnnnnnnnnnnnnnnnnnnnnnnnnnnnnnnnnnnnnnnnnnnnnnnnnnnnnnnnnnnnnnnnnnnnnnnnnnnnnnnnnnnnnnnnnnnnnnnnnnnnnnnnnnnnnnnnnnnnnnnnnnnnnnnnnnnnnnnnnnnnnnnnnnnnnnnnnnnnnnnnnnnnnnnnnnnnnnnnnnnnnnnnnnnnnnnnnnnnnnnnnnnnnnnnnnnnnnnnnnnnnnnnnnnnnnnnnnnnnnnnnnnnnnnnnnnnnnnnnnnnnnnnnnnnnnnnnnnnnnnnnnnnnnnnnnnnnnnnnnnnnnnnnnnnnnnnnnnnnnnnnnnnnnnnnnnnnnnnnnnnnnnnnnnnnnnnnnnnnnnnnnnnnnnnnnnnnnnnnnnnnnnnnnnnnnnnnnnnnnnnnnnnnnnnnnnnnnnnnnnnnnnnnnnnnnnnnnnnnnnnnnnnnnnnnnnnnnnnnnnnnnnnnnnnnnnnnnnnnnnnnnnnnnnnnnnnnnnnnnnnnnnnnnnnnnnnnnnnnnnnnnnnnnnnnnnnnnnnnnnnnnnnnnnnnnnnnnnnnnnnnnnnnnnnnnnnnnnnnnnnnnnnnnnnnnnnnnnnnnnnnnnnnnnnnnnnnnnnnnnnnnnnnnnnnnnnnnnnnnnnnnnnnnnnnnnnnnnnnnnnnnnnnnnnnnnnnnnnnnnnnnnnnnnnnnnnnnnnnnnnnnnnnnnnnnnnnnnnnnnnnnnnnnnnnnnnnnnnnnnnnnnnnnnnnnnnnnnnnnnnnnnnnnnnnnnnnnnnnnnnnnnnnnnnnnnnnnnnnnnnnnnnnnnnnnnnnnnnnnnnnnnnnnnnnnnnnnnnnnnnnnnnnnnnnnnnnnnnnnnnnnnnnnnnnnnnnnnnnnnnnnnnnnnnnnnnnnnnnnnnnnnnnnnnnnnnnnnnnnnnnnnnnnnnnnnnnnnnnnnnnnnnnnnnnnnnnnnnnnnnnnnnnnnnnnnnnnnnnnnnnnnnnnnnnnnnnnnnnnnnnnnnnnnnnnnnnnnnnnnnnnnnnnnnnnnnnnnnnnnnnnnnnnnnnnnnnnnnnnnnnnnnnnnnnnnnnnnnnnnnnnnnnnnnnnnnnnnnnnnnnnnnnnnnnnnnnnnnnnnnnnnnnnnnnnnnnnnnnnnnnnnnnnnnnnnnnnnnnnnnnnnnnnnnnnnnnnnnnnnnnnnnnnnnnnnnnnnnnnnnnnnnnnnnnnnnnnnnnnnnnnnnnnnnnnnnnnnnnnnnnnnnnnnnnnnnnnnnnnnnnnnnnnnnnnnnnnnnnnnnnnnnnnnnnnnnnnnnnnnnnnnnnnnnnnnnnnnnnnnnnnnnnnnnnnnnnnnnnnnnnnnnnnnnnnnnnnnnnnnnnnnnnnnnnnnnnnnnnnnnnnnnnnnnnnnnnnnnnnnnnnnnnnnnnnnnnnnnnnnnnnnnnnnnnnnnnnnnnnnnnnnnnnnnnnnnnnnnnnnnnnnnnnnnnnnnnnnnnnnnnnnnnnnnnnnnnnnnnnnnnnnnnnnnnnnnnnnnnnnnnnnnnnnnnnnnnnnnnnnnnnnnnnnnnnnnnnnnnnnnnnnnnnnnnnnnnnnnnnnnnnnnnnnnnnnnnnnnnnnnnnnnnnnnnnnnnnnnnnnnnnnnnnnnnnnnnnnnnnnnnnnnnnnnnnnnnnnnnnnnnnnnnnnnnnnnnnnnnnnnnnnnnnnnnnnnnnnnnnnnnnnnnnnnnnnnnnnnnnnnnnnnnnnnnnnnnnnnnnnnnnnnnnnnnnnnnnnnnnnnnnnnnnnnnnnnnnnnnnnnnnnnnnnnnnnnnnnnnnnnnnnnnnnnnnnnnnnnnnnnnnnnnnnnnnnnnnnnnnnnnnnnnnnnnnnnnnnnnnnnnnnnnnnnnnnnnnnnnnnnnnnnnnnnnnnnnnnnnnnnnnnnnnnnnnnnnnnnnnnnnnnnnnnnnnnnnnnnnnnnnnnnnnnnnnnnnnnnnnnnnnnnnnnnnnnnnnnnnnnnnnnnnnnnnnnnnnnnnnnnnnnnnnnnnnnnnnnnnnnnnnnnnnnnnnnnnnnnnnnnnnnnnnnnnnnnnnnnnnnnnnnnnnnnnnnnnnnnnnnnnnnnnnnnnnnnnnnnnnnnnnnnnnnnnnnnnnnnnnnnnnnnnnnnnnnnnnnnnnnnnnnnnnnnnnnnnnnnnnnnnnnnnnnnnnnnnnnnnnnnnnnnnnnnnnnnnnnnnnnnnnnnnnnnnnnnnnnnnnnnnnnnnnnnnnnnnnnnnnnnnnnnnnnnnnnnnnnnnnnnnnnnnnnnnnnnnnnnnnnnnnnnnnnnnnnnnnnnnnnnnnnnnnnnnnnnnnnnnnnnnnnnnnnnnnnnnnnnnnnnnnnnnnnnnnnnnnnnnnnnnnnnnnnnnnnnnnnnnnnnnnnnnnnnnnnnnnnnnnnnnnnnnnnnnnnnnnnnnnnnnnnnnnnnnnnnnnnnnnnnnnnnnnnnnnnnnnnnnnnnnnnnnnnnnnnnnnnnnnnnnnnnnnnnnnnnnnnnnnnnnnnnnnnnnnnnnnnnnnnnnnnnnnnnnnnnnnnnnnnnnnnnnnnnnnnnnnnnnnnnnnnnnnnnnnnnnnnnnnnnnnnnnnnnnnnnnnnnnnnnnnnnnnnnnnnnnnnnnnnnnnnnnnnnnnnnnnnnnnnnnnnnnnnnnnnnnnnnnnnnnnnnnnnnnnnnnnnnnnnnnnnnnnnnnnnnnnnnnnnnnnnnnnnnnnnnnnnnnnnnnnnnnnnnnnnnnnnnnnnnnnnnnnnnnnnnnnnnnnnnnnnnnnnnnnnnnnnnnnnnnnnnnnnnnnnnnnnnnnnnnnnnnnnnnnnnnnnnnnnnnnnnnnnnnnnnnnnnnnnnnnnnnnnnnnnnnnnnnnnnnnnnnnnnnnnnnnnnnnnnnnnnnnnnnnnnnnnnnnnnnnnnnnnnnnnnnnnnnnnnnnnnnnnnnnnnnnnnnnnnnnnnnnnnnnnnnnnnnnnnnnnnnnnnnnnnnnnnnnnnnnnnnnnnnnnnnnnnnnnnnnnnnnnnnnnnnnnnnnnnnnnnnnnnnnnnnnnnnnnnnnnnnnnnnnnnnnnnnnnnnnnnnnnnnnnnnnnnnnnnnnnnnnnnnnnnnnnnnnnnnnnnnnnnnnnnnnnnnnnnnnnnnnnnnnnnnnnnnnnnnnnnnnnnnnnnnnnnnnnnnnnnnnnnnnnnnnnnnnnnnnnnnnnnnnnnnnnnnnnnnnnnnnnnnnnnnnnnnnnnnnnnnnnnnnnnnnnnnnnnnnnnnnnnnnnnnnnnnnnnnnnnnnnnnnnnnnnnnnnnnnnnnnnnnnnnnnnnnnnnnnnnnnnnnnnnnnnnnnnnnnnnnnnnnnnnnnnnnnnnnnnnnnnnnnnnnnnnnnnnnnnnnnnnnnnnnnnnnnnnnnnnnnnnnnnnnnnnnnnnnnnnnnnnnnnnnnnnnnnnnnnnnnnnnnnnnnnnnnnnnnnnnnnnnnnnnnnnnnnnnnnnnnnnnnnnnnnnnnnnnnnnnnnnnnnnnnnnnnnnnnnnnnnnnnnnnnnnnnnnnnnnnnnnnnnnnnnnnnnnnnnnnnnnnnnnnnnnnnnnnnnnnnnnnnnnnnnnnnnnnnnnnnnnnnnnnnnnnnnnnnnnnnnnnnnnnnnnnnnnnnnnnnnnnnnnnnnnnnnnnnnnnnnnnnnnnnnnnnnnnnnnnnnnnnnnnnnnnnnnnnnnnnnnnnnnnnnnnnnnnnnnnnnnnnnnnnnnnnnnnnnnnnnnnnnnnnnnnnnnnnnnnnnnnnnnnnnnnnnnnnnnnnnnnnnnnnnnnnnnnnnnnnnnnnnnnnnnnnnnnnnnnnnnnnnnnnnnnnnnnnnnnnnnnnnnnnnnnnnnnnnnnnnnnnnnnnnnnnnnnnnnnnnnnnnnnnnnnnnnnnnnnnnnnnnnnnnnnnnnnnnnnnnnnnnnnnnnnnnnnnnnnnnnnnnnnnnnnnnnnnnnnnnnnnnnnnnnnnnnnnnnnnnnnnnnnnnnnnnnnnnnnnnnnnnnnnnnnnnnnnnnnnnnnnnnnnnnnnnnnnnnnnnnnnnnnnnnnnnnnnnnnnnnnnnnnnnnnnnnnnnnnnnnnnnnnnnnnnnnnnnnnnnnnnnnnnnnnnnnnnnnnnnnnnnnnnnnnnnnnnnnnnnnnnnnnnnnnnnnnnnnnnnnnnnnnnnnnnnnnnnnnnnnnnnnnnnnnnnnnnnnnnnnnnnnnnnnnnnnnnnnnnnnnnnnnnnnnnnnnnnnnnnnnnnnnnnnnnnnnnnnnnnnnnnnnnnnnnnnnnnnnnnnnnnnnnnnnnnnnnnnnnnnnnnnnnnnnnnnnnnnnnnnnnnnnnnnnnnnnnnnnnnnnnnnnnnnnnnnnnnnnnnnnnnnnnnnnnnnnnnnnnnnnnnnnnnnnnnnnnnnnnnnnnnnnnnnnnnnnnnnnnnnnnnnnnnnnnnnnnnnnnnnnnnnnnnnnnnnnnnnnnnnnnnnnnnnnnnnnnnnnnnnnnnnnnnnnnnnnnnnnnnnnnnnnnnnnnnnnnnnnnnnnnnnnnnnnnnnnnnnnnnnnnnnnnnnnnnnnnnnnnnnnnnnnnnnnnnnnnnnnnnnnnnnnnnnnnnnnnnnnnnnnnnnnnnnnnnnnnnnnnnnnnnnnnnnnnnnnnnnnnnnnnnnnnnnnnnnnnnnnnnnnnnnnnnnnnnnnnnnnnnnnnnnnnnnnnnnnnnnnnnnnnnnnnnnnnnnnnnnnnnnnnnnnnnnnnnnnnnnnnnnnnnnnnnnnnnnnnnnnnnnnnnnnnnnnnnnnnnnnnnnnnnnnnnnnnnnnnnnnnnnnnnnnnnnnnnnnnnnnnnnnnnnnnnnnnnnnnnnnnnnnnnnnnnnnnnnnnnnnnnnnnnnnnnnnnnnnnnnnnnnnnnnnnnnnnnnnnnnnnnnnnnnnnnnnnnnnnnnnnnnnnnnnnnnnnnnnnnnnnnnnnnnnnnnnnnnnnnnnnnnnnnnnnnnnnnnnnnnnnnnnnnnnnnnnnnnnnnnnnnnnnnnnnnnnnnnnnnnnnnnnnnnnnnnnnnnnnnnnnnnnnnnnnnnnnnnnnnnnnnnnnnnnnnnnnnnnnnnnnnnnnnnnnnnnnnnnnnnnnnnnnnnnnnnnnnnnnnnnnnnnnnnnnnnnnnnnnnnnnnnnnnnnnnnnnnnnnnnnnnnnnnnnnnnnnnnnnnnnnnnnnnnnnnnnnnnnnnnnnnnnnnnnnnnnnnnnnnnnnnnnnnnnnnnnnnnnnnnnnnnnnnnnnnnnnnnnnnnnnnnnnnnnnnnnnnnnnnnnnnnnnnnnnnnnnnnnnnnnnnnnnnnnnnnnnnnnnnnnnnnnnnnnnnnnnnnnnnnnnnnnnnnnnnnnnnnnnnnnnnnnnnnnnnnnnnnnnnnnnnnnnnnnnnnnnnnnnnnnnnnnnnnnnnnnnnnnnnnnnnnnnnnnnnnnnnnnnnnnnnnnnnnnnnnnnnnnnnnnnnnnnnnnnnnnnnnnnnnnnnnnnnnnnnnnnnnnnnnnnnnnnnnnnnnnnnnnnnnnnnnnnnnnnnnnnnnnnnnnnnnnnnnnnnnnnnnnnnnnnnnnnnnnnnnnnnnnnnnnnnnnnnnnnnnnnnnnnnnnnnnnnnnnnnnnnnnnnnnnnnnnnnnnnnnnnnnnnnnnnnnnnnnnnnnnnnnnnnnnnnnnnnnnnnnnnnnnnnnnnnnnnnnnnnnnnnnnnnnnnnnnnnnnnnnnnnnnnnnnnnnnnnnnnnnnnnnnnnnnnnnnnnnnnnnnnnnnnnnnnnnnnnnnnnnnnnnnnnnnnnnnnnnnnnnnnnnnnnnnnnnnngatagccttatagtatatctttataatactatatcttctaatactatctataagctaaagagtaatctctcagctactatataagtagattttatacctattaatcgcctttactaagtagggtattccttttatatcttctagattctcctttacctatctttagctaataaaggtttaggtagccctactattaattagaattctagtaacccctattagggcacccttataaatatctaagataagtatattatatactaatatactttagcccttctactaaccctccctaaggattactcctagtactaccgcggcctatagtatagggttatctatttttttagttcctttaagttattcttctaaagctacttagcttttaggtaaacccttataatatatctagcttccttatataagtaatataagtcctttacctagttatctaattttactctctagtcttacttcctcttattaaaggataataactattcctttcggctatcctataaggtagatagttcttagccttagtctaataacttcttactattatcttttaagtctatattcctattctacctatataagtactacttagcctatagctttataatatataaaggtatctagctctctataaagctaaggtaggctacttatttattatagatctctatcttagataggtcctactattaggctttagtttaaatctcttttaaaatacctatctctaggtagttaatatatacctaatctaataatatagagtataagtagttatagatccctattagatattaggtatattaatatatactctattctagcttttatatagcttactactaattagcttttactttatactataactatactaagtctataacttaggttaaggcctaagttttgaatatatcctatataatctactttataggattattcttttaatattatatctaaccttaggtaaccttatttaagaggaattctattatttatataacccttactttatctaaggcgaactattataggtatcttacttaaaatacttcttattttaccttaaatatatcttacttatctatagttttactatagaatactagtatattaaataggctttatagctccctaacttaggagattttactactttatactatacctatattattattacagtcccctactactattaggaaagattagggtatcgctaatatccttaatatagggtttaggggttctagtacctaggtagtatctcccttaagtagtagtagatatagtatacttaattcctcctctaaggtaatagctgtaagattctaattataaaggtataataagagtttagctttttagtcggtaattataagccgttttttaagggccttaaggtcttactatttagctataagccttcttttattttctctaatatccttatcggaggattctatcggttaggcggccccctcttctataggaatagctctttcggtaggtatagcccctatcttagtagggatttataaatcctatatttagttttcttagctagtaggtagggatatatctccctataatacctagcttctactataggtattttaaggtatcttataggttctagtagtctaatttataaaataaagtaattagaatattaggactagctaccagtatatcctaaaaatagaggttcgaattagagtaaaggtccctagcgtaggtcatataattcagtagactaatcgctaaggttctaaatctcatatacacagtatatatatacccctggcgcttacttagtaagtacatcggcccatataggccagttgtgtaagtgaccctcagggtcataacaaatattgactttattatagggttaccccctataaagtagtaggataaggtctataatatacttataattatagttaatatagaggactaggtcctaataaagaatatatatattaacttaagaaaaccttataagaaactagactactattatataggacccttttaggttataagagtagtagggaaataagcctactaattaatcctactacctaggtattataggatatatcctatataatatatatctttattaaaaccctttaaaggtaacctataaataggctaagagagattagaccctattatagttaatagagaattagaatatattatagaatatattcttaaaagctactataaagaggtagagtatctaattaaatagaaaggctataaagatattaagaatatataggaaccttaggtatatatagaagaaattactatattagattaatttaaaaaagaagagtatataagactatctataaaaactaaaagggggtaacctataaagaagaagaagataagctaagattataaagatactataagaagtagtatatattagtaggaatatgtcagaatctaggatgaatactgtcatttttcatccctgatacagttggatcacgtgactnnnnnnnnnnnnnnnnnnnnnnnnnnnnnnnnnnnnnnnnnnnnnnnnnnnnnnnnnnnnnnnnnnnnnnnnnnnnnnnnnnnnnnnnnnnnnnnnnnnnnnnnnnnnnnnnnnnnnnnnnnnnnnnnnnnnnnnnnnnnnnnnnnnnnnnnnnnnnnnnnnnnnnnnnnnnnnnnnnnnnnnnnnnnnnnnnnnnnnnnnnnnnnnnnnnnnnnnnnnnnnnnnnnnnnnnnnnnnnnnnnnnnnnnnnnnnnnnnnnnnnnnnnnnnnnnnnnnnnnnnnnnnnnnnnnnnnnnnnnnnnnnnnnnnnnnnnnnnnnnnnnnnnnnnnnnnnnnnnnnnnnnnnnnnnnnnnnnnnnnnnnnnnnnnnnnnnnnnnnnnnnnnnnnnnnnnnnnnnnnnnnnnnnnnnnnnnnnnnnnnnnnnnnnnnnnnnnnnnnnnnnnnnnnnnnnnnnnnnnnnnnnnnnnnnnnnnnnnnnnnnnnnnnnnnnnnnnnnnnnnnnnnnnnnnnnnnnnnnnnnnnnnnnnnnnnnnnnnnnnnnnnnnnnnnnnnnnnnnnnnnnnnnnnnnnnnnnnnnnnnnnnnnnnnnnnnnnnnnnnnnnnnnnnnnnnnnnnnnnnnnnnnnnnnnnnnnnnnnnnnnnnnnnnnnnnnnnnnnnnnnnnnnnnnnnnnnnnnnnnnnnnnnnnnnnnnnnnnnnnnnnnnnnnnnnnnnnnnnnnnnnnnnnnnnnnnnnnnnnnnnnnnnnnnnnnnnnnnnnnnnnnnnnnnnnnnnnnnnnnnnnnnnnnnnnnnnnnnnnnnnnnnnnnnnnnnnnnnnnnnnnnnnnnnnnnnnnnnnnnnnnnnnnnnnnnnnnnnnnnnnnnnnnnnnnnnnnnnnnnnnnnnnnnnnnnnnnnnnnnnnnnnnnnnnnnnnnnnnnnnnnnnnnnnnnnnnnnnnnnnnnnnnnnnnnnnnnnnnnnnnnnnnnnnnnnnnnnnnnnnnnnnnnnnnnnnnnnnnnnnnnnnnnnnnnnnnnnnnnnnnnnnnnnnnnnnnnnnnnnnnnnnnnnnnnnnnnnnnnnnnnnnnnnnnnnnnnnnnnnnnnnnnnnnnnnnnnnnnnnnnnnnnnnnnnnnnnnnnnnnnnnnnnnnnnnnnnnnnnnnnnnnnnnnnnnnnnnnnnnnnnnnnnnnnnnnnnnnnnnnnnnnnnnnnnnnnnnnnnnnnnnnnnnnnnnnnnnnnnnnnnnnnnnnnnnnnnnnnnnnnnnnnnnnnnnnnnnnnnnnnnnnnnnnnnnnnnnnnnnnnnnnnnnnnnnnnnnnnnnnnnnnnnnnnnnnnnnnnnnnnnnnnnnnnnnnnnnnnnnnnnnnnnnnnnnnnnnnnnnnnnnnnnnnnnnnnnnnnnnnnnnnnnnnnnnnnnnnnnnnnnnnnnnnnnnnnnnnnnnnnnnnnnnnnnnnnnnnnnnnnnnnnnnnnnnnnnnnnnnnnnnnnnnnnnnnnnnnnnnnnnnnnnnnnnnnnnnnnnnnnnnnnnnnnnnnnnnnnnnnnnnnnnnnnnnnnnnnnnnnnnnnnnnnnnnnnnnnnnnnnnnnnnnnnnnnnnnnnnnnnnnnnnnnnnnnnnnnnnnnnnnnnnnnnnnnnnnnnnnnnnnnnnnnnnnnnnnnnnnnnnnnnnnnnnnnnnnnnnnnnnnnnnnnnnnnnnnnnnnnnnnnnnnnnnnnnnnnnnnnnnnnnnnnnnnnnnnnnnnnnnnnnnnnnnnnnnnnnnnnnnnnnnnnnnnnnnnnnnnnnnnnnnnnnnnnnnnnnnnnnnnnnnnnnnnnnnnnnnnnnnnnnnnnnnnnnnnnnnnnnnnnnnnnnnnnnnnnnnnnnnnnnnnnnnnnnnnnnnnnnnnnnnnnnnnnnnnnnnnnnnnnnnnnnnnnnnnnnnnnnnnnnnnnnnnnnnnnnnnnnnnnnnnnnnnnnnnnnnnnnnnnnnnnnnnnnnnnnnnnnnnnnnnnnnnnnnnnnnnnnnnnnnnnnnnnnnnnnnnnnnnnnnnnnnnnnnnnnnnnnnnnnnnnnnnnnnnncaaaggaaatactaagagcttcgaggatatagcttataaaggaggggggtaatattacaaccccgagggttacttatacaactagcctatataggccgatatatttactaagtaagcgctaggggtatatatataccgtatatatgagatttagaaccttagcgattagtctactgaattgtatgacctacgctagggacctctactctaattcgaacctccattttcaggatacgctggtagctagtcctaacaggctatatcaatagcatcgaccgggcgcttttacggtagaggacgcgagggagtaccttcttctatatcacagatagcaatcactgcattgattacagtaattcggcgttcagtttctttctcgactatcttccctggtatcgtcaagatactatcgataagcgtcatatactgcagtgtcatatagcctgtacactatagcgcccctataacttctttgttaacaacttttccggaaagttaccgcttactatcaatcaccggctactcattcttgtaccgcttaagattttcacaaatcaatcggtacttttaccatctcacaaatcaatcagtgcttttgccatcccttttcgtttcgtagttactttactacacgattatactactcgtctgtataatcaaatttctggtataactttttgatacctttctcttaagccttctaccgcttacagagtattcgggaataagggctactccgcggtaggttatcgccgaactcctactgtaatatagcctaggtatctttataggtacgcttctgtaacggataaaggtccgtacaagagggaaacacatgtaaacctgcacaggctcgggaaggaacatctatgtcatcatacatctgtttcgatgtcgatccgtacatctttgctattaaaaggggtttttagggtgaaattctaacttaaatcgctaccctggcttagggggggggttagcgtttaaagataaatattgagttttaaaagtacccgattaggtaaaaaaggtattaaaccagctactaagaagctatttttaattgtctccgatttaaaggctttaatttatatagaggggtatactttaaggaattcaagtttattaatatagttaatcctagtctatatttttattttaactaaccggctgtataactgttttactactataaaataaccgatattgagaggttataaaaggtaagaggaatatagtagtatataaattagtataatattattttactcgtaaatttaatcgaattaaggggttaaatagcttctatagctattaagtactaaaagtcgataccttcctactatatataataaagttaatagtataaagagtttctaaagctagcgaagtctaattttattagaagtctaactgtttagactaactttaaaccgctaatcgctaggaaggcctttaaactatgatttaaggaagaccttacctttaaaaataatatatagagggagggcctaccctactgcgtttatatattcaattgcagttacctacttataatttctaggttataaaagtgatctctaactatagtatttacttcttattataacctttactattatagttaatcctattataaatctagtcttatcgaagttatagatattatctagattaattctaaattaaagaatggttttttaaataagattaaactattctctaatgatttttagatctttacatttcgcatacttataattataatatcttaagaaccaagaagaaagaagagggtatcgttttataaaattataaacctatttttcgctaactaaaagaactagggtagttctacactatttaagaagaagattcgccatttctcatactatagagggccggggggctactctataagaatctatagagagaatccatttttgaagagaattctccttagtttctatcaatttctgtaaatttgtgtacgtagtacttcgttaagaacggccagagaggcagtcgcgtaaagttatacgcgggacatcaaaagtatatgtagtaagagtaatcgagctgatatctttattttgaagagcctggatagctaataaaagcctaccctcttactgttctaatttactagcggattgagagcgctttggtggcatggtgggtggttgaactaactaggtactgattcatggacgcgtttttgggtggggtggcgactcgtttacagtggcgactcgtttacagtggcgactcgtttaccgattacgttatgggcctaacgaatgactaatctacaatctgttcttagcgcatctttccggcactgtagatattccggtaaccgaattaccacaggcctgttcattccgacaggaaccaagcatattggcctcaacattatgacgtcacatgataaatctatctgtaaggccgacatcaactctggcagttttgacatcttggacgtttgaggcaagatcttgacatgattaatttcaacagcccagtatttcacgtgctcgctcgttactaccgataagtccctggaccctggctctggactccccaatcatgtccagtcttcacgagctccttcaccgacagcgaccaggacgatggcaagaattccgcgcccggccttgtgtcttcctcgcaaaaatgctttatggttggtacgagcctattccagctacgccactcacaaaacctatcgcggttgtctgtatttccgatacccacaacacccaaaccgacgtccatgatggagacatcctcatccatgctggtgatctcacacaatctggatcttttcaggaacttcaagattcgatcacctggctacgaagcctacctcatcctaccaaaattgtgattgctggcaatcatgacctactacttgattcagcgcgggatgatgtgtctggtcgagcagcctccgagcgagctcaaatcgactggggagatataatctacctcgaaaacgaggaagtaacaatttattgcccaaatggtcgtcaactgagggtctacggaagtccctactcttgccgccatggcaactgggcctttcaatatccccggaatcaagatgtatgggctggctcagtaccagatggaattgatgtgctaattactcatggtccaccacttgctcatcttgacttactgaagtatggctgttcttatttgctacagaccttatggagaattcggccaaggctacatgtattcggccatatacatgagggttcaggaactgagttaatgctgttcgacaggctccaggaggcgtatgagggaactgtcgccgctggagggggcttgaaaaatctactgtttacagcctgggagtttgctaaggaagtcctacgcccagccgtggaagcaaaatgtttacttgtaaatcctgccattgttggagggttacgggataatgaacgaaggttgcctatcaaagtttttatctaattttacaatcttgctgaccaactatattgaatcccacctgtgcaactgtgctatgcatgcttccgtgcccctattatatggactcgtcatttcttctctgcacatggtgatgaatttctcgctttttgagggtatacttatctgtccgatgaatcaccgtgatatgtatcccgatttgtattcatgatagctacttaaataaacaaacccgctgcaataatatcactggatactgaggtaaaacttagtgtgcctttctcctcctaatttttggcatcgcaaacaaagaaaggttctcggaaaggttagctagaccgcagggaaagtacggaggagatagtacgaggttattgctttatttttcaagcctaaagtctctactggtatctcattcctgtgctcaatgtgaagaatcatgtgatatgcgcgactgaacaagggttataggaacacgctgccccaggctacatgctgtttctctaaagtagttgtttccctaaagtagttccgtatgctcctgccaaaatgaattcgagtatccacgaatgactggagatacacgagtcgactggaagctggtagatctgtattcaaaacttccacgttgattaaaatgggtcagtcgctgtccactctccgctggcgtcgcagtgctcgtagcctacaagagctagccgctcgaccagccgcgatacgcgacctgagtccgaatctgtcttgtgaaattctcatttctgccctcgagaatgttgccaaatacacttcagccaagaaccaagacatcactctcgttgtcgttggtggaatcatcaatacaatcttcctcagaagtcgccctgaaactcatgatgtcgattttttcaatgacaatcttccacccgccacgctcaggtgcctttcgaaggcagccaagtccgctttcaaaaggaatcgtatactcggacgggggtggctcaacaaccatgttgttctcttcgtcccatcccatatacgacgtattctcctcgatgaagcgcttgagcagcacgaagttgtttttcaagcccctggacttactctcttagctgctccttgggaattccttttttgtaccaagttgcatcgactgtctggaagaggtgttagcaccgcaacgtcttatgatcaggaggacgcggttcattacttggagaagtacatttcacttcaatctaccgccgctgtagcccagggaactgttaggttttggtttggacagtatttacttgattggaccacagaaacagaggagctgctcccgggtgtgaactccatgtaccagaccacttttcatgttgagcatgatccaatcattcttagttcttaattcttgccttgattgatctcaatacatattgattactcacggtctagctaatctcctgattccagggaagaggtccaaccactcggatgttccaagtttcaactgcgcatcaagttttacggtcttagtcgaaatgaacctctacgtgatgggcataaatagacgattaagtatgtggaatcaagagatgatctcattagctagctagacgtatgaagtaatacgccgcgctaaacctagagagtagatgtcaaacttagaagcgtatttcgtagtacctctccgatatggtgtagtggctaacatcgtcgtctctcacgcgacagccgggagtttcttttgccggcagcggcagcgtaaatagttagcactccgaggcaacctgctgattgactaattagtcactcttcaatctacaggtattgggcccgagtcccaaagttgaaaccctaaattaaggacaagtgtgatgatgaaatagaactatccaagagcagataccgctatttatagtcaacgtcgctgcctaataagcagctacttctacccgtgaccgcccgaacgaacaggagctccgagagctagttcgtcggagtgatagtcacgtataggtctcgcctaagctatagggcaatctagtgggttgcctccgttagccacgataaccctgacacttgaggtaatacatgtaactacatactcgtgattttccccctcaattttagaccgctatttctaagaatctgactgattagatacttttagctacgggaagtgtccgtcccacccaggtgtatggtggatcccaatcattcaatgccatcaaccctctgcgtattctcggtcggtagatgcgtatgttgactatcccaaatcaatcttcgacccctagagcatatacacaatttccggatgaagatcaaccagaagatcaacgactcctgccaagtggccaccgaaatcatttggtagattgtattgacgtatttgtcaaatatacgatcttgataagctaataataatgatatttacttaatatatcgggctttttgatgatcactttagcgaacgggaagaagataagaggttaaataagagaagatgaatactaccataggaagctagataattcactactgcgcattaagatatagaacgaaacgcgaggaatgatgctatctacctgaagcttttagtagatcttacaaactagcgaatatacggaaaagagaatcgaagtgatatatagatatatccgtggaagttgaccgctgttaaagggtcgtttctacgagctacttgctggtgagatcctatacagcgaaccttctgggcccaaacctaacgatccgaataccatcaaagctcaaatcctcctgtgacgatctaggaaggatcgtacttgccaaacgaggcaggaacagtcacgtcctcgtacttgccaaacgggaattaagcgaagacaaacgcgagggtataagaagggaagaacgcgcactcagatagtttctctttttcctttctcctccgtacttagaatttggttgaattacactcctttcttctgaatcgaattggctcgtaacacctccgacaacataaggcagaccataaatttgaagacaccttgaataaatttggttatataatacttccagttgtggttacgtgcacatgccaagatgccgagcgtttcagagggaacggaacgatccaatgacattcggttattgttcagccgaagaggtcagtgcagtggtcgcgcgacttgggtgattctcaccctgattctcaccctgtctatagcgcactcatctttatcacccccgatcgcgcgaccgtaaagcggcgctcacccatttctcacccgggcgacacccacccaactattgactgcatataagccacacgtcggtgagttagtagttgggtgggtgaccaccagcgaatcctcactgttgtatgtttttcttccttttttgcacctgaattagatcagaccaatcactcgcactcgatggtttttttttaagactatgtatgtattgaagaggggaccctgggataggggcaccgacagccctgcctgcgaaacaggtgtgagagcagagtcgtcactgggagtagtagggtgctagagaggagaacacaatggggtaactactgagaagtgaaagtggaaaggtgtctgcgttgctatctccgcctctggggtgcttttatatcacatgaccgcctagtcatcctgctctggaaacccccacgtgcagtatggatgtagttagtggaatgtagtcgcttgtaactttcttcaatcacgaaaacggctgtctccactggtacaggaggcagtctgtggttggccatgtctaccctaattgggatcctttctgtttatttttctcgaggctatctttcatccaaggtctaagtagtccaagctgatcagccagatttcgggtataccccatacatatcacgtgatgcgcttccccacggctttcctattccggccttccccgcacttctgcatatccatctcgcaccccgagcatttcggatagccacggttaagggctatgcggaactggtatggcaatcccggctctttaaaatggcgtttctccccgttttgggtttcctgaattcaagcgattcagcgttgttctcccccttggacttggaattgtgaacccgtcaatcattattctctaagcgtataacactcatcacctaccatttgtcttcggcatcagacagcaaattacattgatcaagaaaatgagtcttcgaacagccgtgtctctcccgcgcagggcgacttgtttctctgcgtccgcagtgaacgcccgacgctggccgtccagcaaggcccgagccttttccacaactacgcaacgcgatgcgacgtgggggtttatcgggctaggacagatgggtatgttttgagatcggccgcgaggacctcgggtatacaacctcggctatacaatggactgtgggatgttgtttccaactgcattatctaactacattaggctaccatatggccaaaaacctgcgcgccaagatccccgcatccgataccttgatcgtgcgcgatgtcaacgaagatgttatgaaacgattcgttgcagaggctcgggaggccgcacaaaacaatggcgcaggcgtcaatgaaggccaagtcgagatcgcgaagagtgcgcgcgaggtcgccgagaaatcggtgagtggctaccacccctacgggttcagcctgtggctgagctagtggcttctctgcataaaccgcgcttcatatacttgtgtccttctagggtctgataaatatgcttatctctgtctgccgtttagatagtcatggttaccagtctcccagagtctcaacatgtcattgaggtgtttcattctatccttaaagatggagcgctgccaccgctcgagcaggagcgtctcttcatcgacgcatcgaccattgaccccgtcacatctaaggatatcgcaaacgccatccacaccacgcaaaccggccgattcgtggatgcccctgtatcgggaggtgttgtcggtgctcaggcaggaacgttgtcattcatgtttggcgcctcttcacaatcaagcgagctgcttgaacgcatccgcagtgtcctcgctttgatgggtaaaaaagcttggcatcttggtgagcccggcgctggcgtgtctggcaagctcgccaataactacattctggctctgaacaatatcgccactgctgaggctatgaacctcggtgttcgctggggactcgaccctaaggcgttggctgaaatgatcaattcgtctactggtcgttgctggccctctgaggttaacaatcccgttcctggtgtcgttgagacagcccccgcatcccgtggatatgagggcggattcggggtgagccttatgcacaaggatcttcgtttggctcttgcggctgcggagcagtctaatactcctctcgccctgggtgctcaggctcgtgaggtgtacaaggctgtcgaggaggagtatcgtggtaaggatttctcggtggtttataagtggttgcaggagaagtctcaataagttctcctcattttaggtgaagtttcctgggtatttttcctttcgatgtctcccccgactcagtacctgctgctctttctcatagatgtggatttcaggatataaaattacaatatagcattcttctactcaatggaattgagtctaggatttccattttgtgtttctacatcttcagagcatatacaatattcaatatcaatggttgatgttctgcagctttcaggtacacgggatatagttgtctctcgccccatgtgacttccctttctctttcccccccaaacacgccaacgcccctcatagctccttctcttcctattcttacgctctttccttatccgacatctgccattctttcttcttgcgtctcctcccatcctctcattccacctccatcctattccttcatccccctatccctccatttactctgccatcggtcctgtcctggcccatttatccccttgtcgatttcaaggtcatccagactttcattccgtatacctcatccccacctacctcttccttcgtttcgagttatcatcagacgccttgtagcctgaacagacggaaggttgcatcctcgacaacaagtaagtcttccactcaattttgccatgtcctactagcctaccggtcctcgttctggctgacactggcacacttggatagcagctagactttcttctcagaattgtctatataatttggtgcaggaactcaggtgagtttcctgcggttggcactatgccattgaggaattttgtcaaatggaggctaaaggggctgcccatcaagccttcttcttgtctgccaattccaaagaatcagctgacaaaatccttctctttcagcatacgcccttcgtcatgcaccctcagggctctcaacacacaagctcctctggttctggctcttgtcagacatcaagctcccagtctgcacaatacccccaagagcctcgtacaccctatggtcccaggtaccaccaatctaccaatccgagttctattgacagcagtggtgcaggcctgaccaatcttttcagaggattaaatctgcagaactctcgtcccaaattcaacggctcaaagggcaccgcacccgttcaaatgaacacaaacatggactggtcgaataccaaccgtgcatacaacagcccattcatcctggttccgaattccaccgttttcaatggcgttccgaccgtctcttcctttgttcctaacggtgtctctggtcagactgatcagatgggccaattctcgtatcttccaacgggagtctaccccaacgtcaatcctgtgatggctggtggatactcgtcgtggccctacatgatgaactacgacatgcaggatgggacgaccaacaagcaagcatgggtgtctgagggccagaagggagttcagggggagaacaatggacaaataaattactatccctctgctcttgtttctggcatggatggcagttccatgtctggttactcttatggaggcatggttccctcgcagcttgggtcgctctcgcttcccctccaaatgatgaagactcccaacggttacgtcgttcaagatctggaggctctaactcaacaagatcctgccatcccacgcgcggtgcctgccatgtggactaacccgtctgagctgacactcgccaagtgtctggaaaatcgcgagggtataaccaatgtctacatccgaggattcctgcccgagaccactgatgagatgttgcatgcctacgcagctcgtttcggaaagattgagcgttgcaaggccatcgtggacctggataccagtctttgcaaagggtacctactccacaaaacttctttccgataatttattctaatcttttgcagattcggttttgttcagtattacagcttcgaatcctgcgagaactgcattcgcggtttcttttacctcggctaccaagccagcttcgcccagaagtctcgcaactctcgcctgaaggatctggaggacaagtcttctaccaatatatactgcaccaacattccaatcgattggactgaagccgtgagttatacaaacccccacacgcttgtctgtcctgttgaattctaattagtttatcaggacctgcgtcgtcatttcgagccatggcgtgtggtttcggaaaagatcagtcgcgatgagaagacaggtgtgagcaaggaagtgggctttgcacggtaaaaaagcaaattccttccttgactctcatgaccttttctgactggtttacagcttcgaaaaccgtgatgttgccgaaaaggtcctgatggaattccacaacgtcaccaaggacgatggggtaaagctgcttctgcgctttgctgataccaaagcgcaaaagatcctgaagcaacagagcaacgaacgtcgtgcttaccgcgccggagaatataactactcggttgaagtggttcagggatctactccatcccctgggatgaaacgtggctctcatcttactccaaactctcaagtcagctatacctctccagctggtgtgggcgctaactggaccccggcaacttccatctccccttggtatgtctaaatacttgaactgcattccaaaactcattctaatcgagctcacagtcacccgcacatgaagaatccatccagcagtgcacgaagcagttccttgtcgtctcggagcctcaatgctcttgaccacacgcccgcctatcgcagtcgagccttgtccctgaaccgcggctcttacactgatctctctggtggttcttccaagaccgccatgccggactcgccgactatggggtctcgtaaagagaacatcagagcgggctctgtatcccccgcttcttcttctcccatgatcattctctccccagctcgctcgtgcacttaaaccagccgtgcaacgtgctcccacgcatatatgtatttgcatgggatgctttacatcatcttatcactcggggtaagatgatcagcacctctccagggtgctctccaatatccaaatgcgcagcatctgttaccattcgcagaatgtatcgacgatgtatagctcagccttgcttttttatgattgttctacgattcacgattcatgattcacgatatgatattcggttgctttctgtttacgacccttcgtggcatttttagatgactctacgcggtatcattatggagttcgatctgcatttttatcaagtttcatgggaggatgggaaaagctttttttctttctttcgcagttatatggactttacatgttttcagcatatgtgacagacaagatgcatgtttcaagacttcgttcaaagaacgctatcgcaccttattgggttgcgcagtctaatatgatattattcaagatgaaaaatactccatgtaaggtccatgttcaagatccaaagtgcgtgagcacaattgtgacgtggagggcaatctatccgaaaaggctaatgagataggaatctcgatctacacaggtaagacaatccacattattcgggtcaattgcgcccaagtctctcctccagatcctcggtgagctgataagcaggaagatactgtccatcaagctgagccccaagccgcaatctcggattaggatgggtatcagacgtgccaccaagactagtatatccctcgtcataaagcgaacagtacttcaaatccagatgccgaatgaacgcccagatctccgcataatgccaatcaatcatgggatgcacgcgtacgaaatccggccaccccccgtccgtccgatcaaagtgcgtcagctgtgtgccatgcggatccgtccgccgcgtaccaacaaatatcgcccggatcccagggtggtgcgccagataatcctcaaagctcgagcggagcgtcgaagccggcggcgcagtcgtgtactttgcaatatcgagatgataagctttagcggaggagatgacgaagtcttcgacttcatcgaagggatcaggtgggagggcataaatcgccgggatgaccttcgccgcggctatctgggcttcggtgtcgaggtctgcgggggagggggttgtatcggttgtgtttgcatttgcggtggggtgtgggtcattgccggcatggattggatgcaacccggccagaaacagaattagcaggactagacagtccttgccgccgttgtaggagacggatagttccgagagcttgtatcgctgcagcgcggtgctgactacttctagggagatgcgcgtctgccgttgcacggaggccagcagcgtgtccggggcgtggggttcgtttaggaaggcttgtacgcgggcgtggatgcgtgagatcacggtggggagaggaggaattgtttcatcgctggttgagtcgttgaggggttgtttgttgctgtgaggtgttccattctggttcggctcgggctcttggttgggaggggctgatggtttcaatggttcggatgttgctggtggtagtggtgggaatggttgaaggtgatcttgcggccggaaaggcgcatgttttggagttgtttcagtcatgcttgtgttgaggtgaggttgacggagcgaggtttggggcggggtgtgggtttctcggggagacacaacttaatccactgcggggatacaaagccgatgtcaagcatgtgtagacatactctatgtatacatagatctagataattgaaggtcgatataaaccaatttgggaacttcccggaacccccgcgcctcaccgcggttcctcggtggaactcggtagattctcgtggatctggataccgcgaacagcctaggcatatatgattcatgatacaatttactgaatgcaccttgaaaaaatgcttaattgcggccgtggccgtgacaattcataagtagatccctagacgccggtaacgctcagaagggaaaaaaaaattaaagtcaaatcagcccaacaccttcatcttcttcttcttcttcttctcatcaccaccaggtttgcgccccttctggaaatcccgccagctaccaatgcgctcttcgcgcgtctcctcccacttcttgtcattttcgcgcttgcgcttgcgtgcctcgagctcttcttcttccttgcgttgctcacgaccttcctcctgcaaacgtgccttgagctgtcgccggcgtcgcgcttcttcatccaatagcacgctgattgtcttcttccgccactcaaccttgaactcctcggttttaagctcgggggagtcgagtgtgtacttgtgttcacgaatcaacaggcggcgcgcatcggagatacattcgtccaggtattcgcgttgcttctcgtctagaagagcttcctgtgccttattgaggcgatcgaaggcatctggagcagcggggttcttggtcttgtcggggtggatcaggagggagatcttgcggtattggactttgatgtctttttctgtaacaccgggttggaggtccaggacggcgtagctgcagtgggttagtgtatgtaaaatatatagaggggcattattctattgtagatattaagattagacgtacgaatcgagcttgaatgccgagcgaatgcgatcgatctcaacatcctgtgtcgcgtgtcagtcgcaatctagatgtataccatgtggaggagggcatacctttttaaactcggaggcctctttctctagagcttcgagaaattcctggtctggctcgtcgtccgacatattgccttctgcggattcttttgaggtaggaatgttcttgcgctcaagagagtacgacctcaaaaaagataagacagcgggcttatcggtcgctgagtcagcgcccggggccccccccccggcccccccggcccacaacaaaaaaagaagnnnnnnnnnnnnnnnnnnnnnnnnnnnnnnnnnnnnnnnnnnnnnnnnnnnnnnnnnnnnnnnnnnnnnnnnnnnnnnnnnnnnnnnnnnnnnnnnnnnnnnnnnnnnnnnnnnnnnnnnnnnnnnnnnnnnnnnnnnnnnnnnnnnnnnnnnnnnnnnnnnnnnnnnnnnnnnnnnnnnnnnnnnnnnnnnnnnnnnnnnnnnnnnnnnnnnnnnnnnnnnnnnnnnnnnnnnncgcgggggccccgctgccggacctggcagcaacatacaagagtagcagtctccttgtctctctcattagcgaagactatcattgtcatgtacaaacatctagtcggccaaaaatcatattagatattccatccaagacacgattacaaataagctgaagacatcaaaatatctagtagttattagatatcagagctccttaccgctttccctaccgcctttgtttttcgctcccaagaagaaaaaaaagatgttttcaccgcccgctactttcaagattcaactcaaaccacatcatggcgccacgagcagttaaagggaagtcaaagcctcaccaggagacaggaagggtcttgaaacgaaagcgtggcgaggatagcttagctacactcatcaagcaggtcgaggacctcgacctcaaaacccccgtcaaaaacttctccgatctcccactctccgaaccaacagccaaaggcctcgcagcctctcattttaaaactcttaccgacattcaatcgcgtgctatcaatcatgcgttcaagggacgcgatatcctcggtgccgccaaaaccggtagcggaaagaccctcgcctttctagtgcccatcctcgagaatctttatcgcaagaagtggactgagttggatggtctcggtgcactcgttctctcgcctacgcgtgaactagcaatccagattttcgaggtgcttcgcaagatcgggcgataccataatttctccgctggattgattatcggcggaaagagtttgcgcgaggaacaagatcgtttaggacgcatgaacattttggtttgcacacccggccgcatgttgcagcatttggatcagacagctatgttcgagacgaataacctgcagatgctggtgctggacgaagccgatcgtatcatggatatgggtttccagaagactgtcgatgctatcctcgaccatctccccaaacagcgccagactatgcttttcagtgccacacagaccaagaaggtcggtgatttggctcgtttgagtctgcaggaacctgagtatgtctcggtccatgaatcagccgcctccgccactccctccactctccaacaacactacaccgttactccactcccgcagaagcttgacaccctttggagtttcattcgcagcaacctaaaatctaagacggtggtcttcttgtcatcaggcaagcaagttcgctacgtatacgaatcactaagacaattgcagcctggtatttccttgctccatttgcacgggcggcagaaacagggtggacgattggatattaccactaagttctctcaggctcaacacgctgtccttttcgctaccgatgttgttgctcgtggtctggatttccctgctgtcgattgggttatccaaatggactgccccgaagacgccgatacctatattcaccgtgtcggacggacggctcgttacgagcgtgttggtcgtgcggtgctcttcctagaccctagcgaggagaagggattcctcaagcagctcgagcacaggaaagttccgattgaaaatatcaatatcaaatcgaacaagcagcagagtatcaagaaccagctgcagaatatgtgtttcaaggatccagagctgaaatacctgggccagaaagccttcatctcctacgtcaagtcgatttacgtgcaaaaggacaaggagacctttaagatcaaggagcttccgttggaagagtatgcagccagtctgggtcttcccggtgctccgcgtattaagttcatcaagggtgacgatgcgaaggagcggaagaacgaatcttggcgaatggcacaaatgtccgatgatgactcagacgcaaagacgaaggataagaaggacgagaaggaagtgcggacacggtacgaccgtatgttcgagcgacgcaaccagggcgtgttggcggagcactactcgaagctcatcaacgacgatggcacgatggtggctaccgatgcccccaaggatgccgtagaaatcgacgacgaggccgacgaggatgccgacttcctctcggtcaagcgtcggttcgccgcaggcgatgcagaacttggcgggaagagcgattcttccgactcggaagattccgatgcggagccaaagatcaaagacaccaagggtgtcaagatggtgcacttggacggccaggacccactactcatcgactcgaagcgacgcgagaagctgctcaagtcgaagaagaagctcctcaagttcaaaggcaagggtacgaaattggtctacgacgacgacggcaatgcccacgaggtgtacgaaatggaagacgaggacatgttcaaggcccgcggcgacgccaacacccagcgcgagaagttcctcgaaggcgagacggagcgcacacgccaggccgatatcgaggacaaggaggttatgcgcgagaagcgacgcgagaagaaggagaagcgcaaggcgcgcgagcgtgccgaagccgaggccgaggccgcgatgtcggaggaggaagacggcctctcgcatctcccccatgtgcctttcgagatccccggttccgattcagactctggctccgagcgcgagccacggcccagcaagaagcagcgtgtctcttttgccgagccggacagcgacgacgacaagcccaagagcaagagccaggcttctgccaagcctatcgaaacgctgggagatctggaggctctggccagtggattgcttggttaatgtatatttcatggtttcatgtgtttgaggtctttgatggcgtatgttttccaaccaaaaaaatctctttcccggcgaggttcaaaagcatagtgaatatgaaagcgataatttccagatgtgtataaactatctcatacatgtctaaataagctctaaaagcctcctaaatgtagtatgtgtgcctgaactacctactccgtacctgtaaccctataaaatcttaccccaacaccaaatgtgggggcggacatttccttgacacatcaacgtcacatttcgtacgttaagccctgtgtactcatcgatggcttcaatcacgccatcgaggaagaaaagtcttgctatgtggtttttatcttcatcgtgttcatcttgatctcaactgttcccggtcaatgtgcctaatataacttagtgctaccataaacgccaaggggttgttgccaagtgtgggtcacgcgacttagggctgaatcgtcttagttcatacataccaacccggacaggtgagagatgatattgtttgacctttcttttcatgttttgtgctaagacaaagttagtggatacctccgtatccatattcattctatatcatggccgacatcgagaaatacccggcagcagagccctccaaggttccagacacaaaagccgatgatgtcccggcaaacccatttgtcaacgcagacaagctggctcgccgattgtctgggcgtcaggtgcagatgatcgcgattggcggtaccatcggcaccggtctattcctcggaacgggatcgtcactttctaagggcgggcctgcttcgactctcattgcatatgctatttgcggtggtattgtcttcatcactatgctgtgtctcggcgagatggcggcatttatgcctgttgctggatctttctgtacttatgctgggtgagtattagttacttgttttttcagccggatgattactaacttgctctatagtcgcttcgtggatgatgcgcttggattcgcattgacttggaattattggtttaatgatgctgtctctactgcatcggatatcattgctttacagcttttgttgcagtattggacggatcatttcccaggttgggcaattagtctaatcttcttggttgttgtcattttattgaacgtcctatctgtaaaggtttatggcgaggtatgtctagatgacttacactctattacccacctgatctaactgtccctatctaggttgaatactggttgagtttactcaaagtcatcactatcatcgtgagtgctatcccttacacaatacgcgcacgcccagctaattatctttctagatcttcattattctgggaattgctgtgaactgcggcggaaatacagaccacgaatatatcggcggcaagaactggcataaaggcgatgcacccttcgtcggtggaatcggtggctttgcatccgtatttgtcacagcctccttcgcatagtatgtgaactcattttatcattggttctgctcaatgagctccattctaacaatcgaacagcggcggcaccgaatccatcgccatcacagccggtgaaaccaaaagccccgcgaaaacaatgccaaaagtcgtccgcaacgtcttctggcgtatccttcttttctacctcctttcgatcctcatcgtcggcctaaatgtaccgtatgactacccaggcctctcagacggcgacacaaagaccagccctttcacaattgtcttccagcaagctggttccgctgtcgctggcagcttcatcaacgctgtcatcatgacttcggtcatctcagcggcgaaccatgccctcttcgccggatctcggcttctattcactctcgccgtcgatggatatgcgcccaaattcttcggtcatctcaatcgattccaagttccgtgggtggctgtcctcgcgacatctgttatcagcggtctctgcttcggggccagctatatcggcgctggaaagttgtggtcctggctgcagaatatcgtcggcgtatcaaaccagctctcgtggatttgtatcggtcttgcttctctgcggttccgctcggcgatccgggctcaggggcttgagcatctccttccctttaaaaattggacttatccgtatggtccgatctttgctgtcgggcttaatattgttctggttctggttcaggggtggaagtgcttcagtccgcatttcaagcaggtcgactttgtttcgtattatattgagattccgatcatgattgccatgttcctcgcttggaagctggtcaagcgaactagctttgttaggaagtctagtatggatttgatgacggaccgatatgatccttctcaggaggatgggtacggggatgggcctgagggtccggttacggagaagaagaagggtgcctggcgtaaagctcaacggtttgggcagtggttattcttttagtcttgcttttctttattctgtgaaaaatcgtatttcgtttcttccagttcttaggctttgtataacacctcttccactaagccgttcaagggtaagcttgtagtcgcttttgacacagcggtgtcgtaggctgtttcaatgcaatccacacacgacgcagctgctgctttgacttgagattctgtacagagtagttctgtactgcttgttggaacatagccgagaatcatgtaaatctaacctatactttattccatggtgctgcagttcatatcaccgatctatggatttttccaaagttggctcgcgccgtggccactctgaataggatgatatcgctcggcgtaggtgatatagtagacaagatcgtcggatatagtacggagcataacggagtataaactgaaccgttttaaccttacagccctaggctaacgagattttaagaggtttgaggctcgacgacccattctatatgatatgaattttaatggcggtttccgtaacgttgtagcttggttcctgtctctgtagaaagatggcaggattagctacacttggagaaagggggaaccctcaaaaatggaggacaagaaaaaaaagaaactccgatagggggaatcgaacccccggctgccgtgtgagagacggcgatgttagccactacaccatatcggatgaggactgcgaattactctcttaggtttagctttgaccttttgggtttagctttgaccttttgggtttagcgctctttgtccgtgtgcgttcccgtgcgtggttctataaagtcctccctttaaatttccggctctcctactcctcctttcttccccagtgggagcggaaaatatagttccaggaaatgaggagtgggccttgggtaacaagatgaagctgaagtaagtttacattgcttctatatctactattttgtacagagaacgtcctcggactctagttcactaatactcagggctatgttttgtacacagactcgctcgcggggttcagccggcattcgtgccggtgtatcagtcggaccgcaaaagtctccgtacggtcgggatccacacccgcgttttttcgcgaatacttatgttgtacaacagtctaggttgtatttactaaaattgaaaatgggagatatatatttgatggggggtgggtcgtacggaaacttttgcggtagaactgtatttagacttctctattgggccggggtgggcctaggcttccgcaagacccaaagcccaacccacgatgggccgggggtcgagccttcgggcccaactcggtcttcctgctgttaacagtgctcgcccagcctctagtcaccagcctctccaacatctccggtcgcatatacctactctacagttgcctcttgctgttcgcagctggcgcggctcttgtaggtgcagcgccgaacatatatctgctcattgccggccgggtcgttcaggggattggcggtggaggggtggatgtattgacggagattatcgtcgcgaggtaaatgggaacgaattgattgggttgtgatggtcctttttgtcgttgggtctaccgccacaatcgccccccttagctgggggggtgttctttatccatggagggcgtggcagacatacgtgccattaacaataggtccgctgctactaggagtccttgcattccatgaataccgcacggaaattcccatgtttcctcatcggatcctcgcaggcacaaccccggcgtgctgcatgatcgggtctctaatccatgggctgataacagccgctgttatctacattctccctctttattttcagggagttcaacaggaatcaccgataaaatccgcaataagtgcctttccattcagctttctggctgttcctagtggttcaatcgcggcgttcctggttactgcctgttcccagtacaactggatcatgtggacagggtggattaccatcagcctgggcgttggcagtatgtcactgttgggcttgcaatcctccagaagccttcaattcggcctccaggtcccgggaggaataggtgtgggcgtattgtacacaataatcgccattcccttgcaggcgacgatgcacgttgatgatgtcggtcttgcagtgggcactctggtcttcttcaggctgactggtcagattattggtctggcaatcagtgccgccatcttttctaatacctatactactcgtgcttcgcgctgggagaacctgccggcgatagcggagcagttcagagacggtagtgcggcagtctacgccatcggaaaattatcgtctcttgacggatatccgttagtcaaagataaaatacttgaaacttacgccgtcagcttacattacgtctggatagcattggcggtcttggcacctgttgggctgttgaccagtctcttcatcgggtgtaaaccattgaaaaatgatgagataggaaggcagggatttgccgatataaggcttcaggagcaaaacatctagcattgtataatagacaaatcattattctatctcaattggttggatgactatctatcccgcagcgttaagaccgcagttgacaggaagaatagacaccttcaacgtgtgatcactggcaaccaggatggatacaatcactcgctcaatataggtaaggtttctgagttggtccgcatactaccgccggccacagacttcccgtggtccccgtcggactcggaagccgtcgctctcggtcacacccacgtatacttatgccctccatttgccatagcccggagagccaattcatattcatatcaccgaccgtcaggaacgaccggacttatacttcgggtttaatgaggctcagctcacaaccgccatccctgtctccagctactggctgtctgcgacattctacgaaccgctccgactacttcgatcttttccccgagtatcgcctgcaaccgacggaagaataacgccgccgcaatgtcccctcgaaatctcatgtcatcaagacggtcctgaccctacatgtagtaccgcagtcgatccccacgttgcagcgagcttcaccacccgaggcaagtcgcttcgttagactaaggccgagcgaattatactctgtcggggcttacaagtgacgactcagttgaaataatacgccaagcattatcactagacccagttgtatttaacgacagccatcaagcatgggcaaatagtaagggaacgacccttcttgaaacactcaagactctatcacaggcagtcaaagatctccagaaaagggccgatacccaggagcaaggacacacaaaaacacctagaggatatacaaaagaacctcgaggatacacaaatagacctcgaagaggcacagaaagccctcatcaaatatgagcggacgtttgacgcatatacaattgaggtgcagtcaattgtgctggataaatgggctgggaagtctatcagtaatactaggaggtctcagcggaacgctgctgcccacggtggtagtatccttgccgattacgacgtgatcctccgggaggtggactagccaaactcgagggtagacctgtggaagccggcgtttgaatcccactatatccaaaatgcttacaatttgcttaaggccttccagtagactttaccggatagctactggcaaaagcgatgcgattgcagcctgcttttcgaggtcaagaagttaaagaaggctgatatacaggtagattggtaggctcttaggttagatctgatcagccttcttatcgaagacgaattaactagtggcctaagaaaccgcgagcgcgtcctttgatatataaaccatattgagaggagatttatcgaattagtataaagtatttactcgtctaaaaagtacccgccaagaacggccttactcagagtagttaaaaagggtatatagctagtaatttggcgtgtgtgtatagtaagtctcttttaaagaaaaatctattcttgtcttggatatatatatgccagaaacaaccggacactgttatcatttctatcaccacctggggagaagttgacgtatccacagcaaaagacgtttttatcgggaatggaactgtactgctttctgtcatttgtctgcgcttgttctgtagacaggctgcgacggaatactcatgcaatgactcgcgtacattaaactcacagaatcgagaacacgttgcaagtctgccctgctcttgcacgcataaaacagcatcacttcccttgcgccatgaattatgaggctcataaaacttcccctcgtatttttgtaggacatccgttcgcatgtactatatgatcggaatctgcgcaaagttgtccacacatctatagaacagctatttgtggtactttcctggcacacctggaggaaaaggcaactgtaaatgtctcagtctctcttattattcccattaccagaccagcaaaattttgcctcctcaaattggcagttctctcactatcacaacttaacaccgtcttattatccaaagcccttcaaatgaaagccaatgtgttgtcccttcatgaaatgacagcgatggccttgagaattttctaacgcgctgcccttaacaacatcgccagtggtgttatgggtcaagacccgtatgctctccatagatacgaatttcgattttttggcgaaggcagtaagatgcccactgattgactgagcaaagatggttgtacttctccggtgttggagagaaaagaagatacaagaactcccaatcggagacatttaagcgacgagtcctcacatacaatcaattttagctcgtgattggttgcgtcgcggttcatacgcacagtccaatcagaaatggaattatcagaaagaccagacccacttacgcgactgattgatgtatagaaccacgtgagtggacggcaacttcacttgagaattttttttttcattcaatctcttcacaggtctaaagaagtgaaagaatgcgccgatataacataccgatgagtcacagctcaaatgagggcagggttgagcttgaggctgctcttgagaaccctgcggatggcgacgtcaacttggcctttccagaaggtggccgagacgcataggtctgcttgctaggatcatgtctcatgatattcccctcatttggctttcagactgcaggtgaggatggaccatactctttttgacctgtcgaggacacgatgacttacactattgatagttggatccgtccaggattatatcagcacccaccagttggctgaatatggagagagagatgtcggctggatcactgcagtgcttgtattcctgaccttgtttctcggagttcaagctgggccgctctttgatcgatatgggcccagagtcttgttgatcagtggatcacttgggagtttcgcttcctacatactgctcgcagaatgcaagaagtattggcactttatgctctgccttggtcttcttggtggcatatctgcagcaattgttacgacagtctccattgcagttctcagtcactggtttagccgaagacgcgccctcgcttccggaatttgtatgggaggatcatctgcgggtggtgcgatcatccccttgatgttacgaactttgtttggaaaatatgggtgcatatgggtcatacggaatgtagcctttatggctttgggatgctacatggtgggagtgctactcgttagaggacgcctaccccctggcagcaagaacagagtgacgatcgaccttgcagctttcaagtcaccccgtctatgttttcttgctgtggcagtcttttgtttcgagttcatcatttttggatgtgctgcgcttcttccatcctatgtccgttacagccggttctccgtggatgtgcaattttattccctcactgtcttgaatagcatgagccttctcgggagagtcctccctggctttgctgctgatttatttgggcgatttaacattttattatccttggttgtgataaccatcgtgataatggcgggtgtttggctaccatatgtaaacttcctgctagccctagcgttcgagtctataccttggctttccatttccagttccagtccaaaagagcccatcgggacaagatgacgctgagaagtccaacgagcataatggcaaagtagaacccaatgagaacctgtgaaatgaagttaggactcggtgtgagggacggctcataggtgaaaaatacgtttcacgctgtggttgggaacagagtaactcggctagtcatgcgtagggcgcgcgggttggcccacccatcattaattggttgaggttgcctcacttggatacgcttatcccgccagcgctttctattggtcaaaccttgataccaatccagccaatcagaaaagggggaatttcgtatctcactattgaatcccggacagagaaaggtacagatgcaggaaatatgaaatctatacattcgcatatgcagacgttcttaactagagagttgaccggcttcttacattcttctgcatcatatgtgagtaaagcttcatgctgacgataaaattacctgtaacatcctgacccgggcccgcctccattggatgacaggctgatcacattattaacgtctggtcctcctgggcttcaccaacaaaccgatggcattccctatgtgccctccactaaatgtaattcacataatcgaaatcttatgatgcctggccagatggctcttatatccaggaagagacatccaaacactcaaatatccagcaatatcacattggcgacccgggctttcgaaaatgtcctgaaggtaatgacctttaaactaaacctgaagtatagcttctgttgtctgccatgaagatagctccccactgtggagtatgtcgtagaagcttatgttttgaaggagctaggctgggcgctattctggcgttacctcgtgaccttactaagggacggcggcttcaaaagtggggttctctttattactttgctctttggcccgtcgaccttgccagtaggggtacgttttggtcacgacttacggctagaaaagaagattccagatatctattaaagatataagtccctgacgtagatatatattcgcaagaagacattagagctcaagcaaaaataagtttgttttcaaaactcgcgaatcatgcggtggactgccatctcctttctccattggaggagattctggatccgtccggggtcaaagcgcggggtagtgcccgtccggggtaaaactcgccgaacccatagcccgcggatgagatgacaccgagaggtgtcctactctgacattcgtcgagttctttgaagatcgatcatatttatcttgcattctacgtccaatgctccctagtgagcatgatgccctacagacatagagagatcaagcatcatgagcatccaacttcatgttcggaggccagcggtcgaagacactctgaatgggtcacgtttgctgatcatttgcccattctcaggttaaataactagcgcttacgattaacctctcccggctcctcggttaaattccaaggtttattcgttcattatgataggctcgacatgaccgggctaccctgacagggaatcaggagggtcggactttagagtggacaacaagaaaaaaacctgggacgggacacagacatgactcgcattcactgagcgagggaggattctggattctcccctaagatccaaagaaggatattctccggcgaatggaacgccacatctagacgtataccaccacatttcagcataccccgcaaagtaaccaggatatttcctccccgctattacctatcaggactagtccatgtccgatcacttcgcttgacaagaacccggcataatcaagtgacgctgctaccgtagtgcccggggaaatgaccctcatgcaaggagttgccgggttgaggtggtcaatgtccggagcaagcttcacccaattgagctaagatcgggaccatcatcacgagcgtgtcgccgcaggtataaagatctgagaccccctgtcatgcctgcccctctttcattcacccgtttctctcggaaatcgtcaacatgaatagcgacatcacagagaagcagacctcagcggaggagatcgagggacagcccacatccatgggtggacttgtctacgatgtcggtgagaaggcccactacgacagagcgggcgccatcgaggccgaggtgcttgaacatagtatgactgtgcttcaggctgtcaaggcctatcccgctgccagctggtgggcattcgtgatgtcatgcaccattgtaagttcctgctcgagataggcagatcatttccgtaacgttgaaatagatcatggaatcatactgtgtcttcttgatgggacagtttatagcgacagctcaattcgccgaggattttggtgtatacagcgaaaaaacaaacgagtggattatcgaagcttcatggcagtcagcattccagtgtagcgggccaatcggtgccttcatcggtgtgttcatggcaggtcccattaccagttggattggatatcgatgggccaccattggtggtctcatgttcttgaacggcttcatcttcatcttcttcttcgccaacagccagggtatgtttttcgcgtcccagatcctggaaggcatcccgtggggcatttttatcgccaatgcacccgcctactgtgccgaaattgtgccaatgagattgagagctccagcgacacagatgttgcaaatgttctgggcggttgggtcgatcatagtcggcggtatcacttaccactaccaatccaagaatgactcgtcagcgtacaggttcgtccgctcccatagatgccatagaggagcactgtactaacactgatcccagagttcccattgcaatccagtggatttttcctactcccctcgctatcctactcttcctcgcacctgaatcaccctggtggctcgtacgaaagggccgtctggctgaggcagagaaggccatcaaacgccttggacgcgcgagtgcaaatgataatcccgctgacgcagtcgcaatgatgcgtcgcacgattgaactcgagaagactgagaagaagcccagtcttattgaactgtggaaaggtaccgatcgctaccgcacattgatagtgtgcggtgtatacgcatctcagaatctgacaggcaatctgattgccaaccaagcggtttactttttcaaacgtgagtccagccatttcctgcagcttcatggcatactaacaccagctcagaggccggcatggtagacaacaccgcatttgcacttggtctcatcacttctgccctccagtggatcatggtcatgctctcttggatcctcactacatacctcggccgacgcaccatctatgtttatggtcaattcatcaactgcgcattcttagtcgcgctcggtattgcggcttcagttggcactagtaacgcggctagcaatgcgcaagcgtcgcttggcttgatcgtctctgtcctgttctgtttgggacccgcgcctgcctcatgggttatcatcggggagacatcttccgttcgtcttagaccactgacaaccggtgttggacgaggtgcatactacttggtcaatattccttgcatcttccttgccagctacatgctcaacactgataagtggaatctgggcggcaagagcggctacatctgggctggtaccgcctttttctgcactgtcatgtcttggatttgggttccagagatgaagcacagatccttccgtgagattgacattctgttccggcgccatgttccggctcgcaaatggaagcagacggtcatcgatatccgcgatgatgagtagatggaaattgcggtttggaggttgctttagggttagcgatcaatggaatattcgacttaaaggatgattgatcgtcttcgaggccatcgagtcttaattatatacctgggggactagtgctcccaccctgttacgattcacgtcataccaccccctttcctatttgggaatggttaatgcctgatacaccgccttagtgtttccctagtaagacggtagatacctacaatttgtatgtaaacactaacaaaattaagtcacttttaccacatcaactacgtcgtcaactacttcaaaaactacttcaaaaactacttcaaaaactacttcaaaaattgctttatcatcatcaagggattaaggcatgtagttatgagacaaaatacacgttttttcctgatcaaaatgtaggtttttttgactcagtctcgcagaattaaattgatgccttatgcgtaaggcggaatcaggcggaatcgaggcggaatcaaggcggaatcaagcggaatcaggcggaataatgcagaggggggtccctataagttataacaatccccttcgtatattatcggaccttgcaacccttcatgtatgctattgatcaaatctatacgcctcatcaggtgtgactcactatccgcgatagatcgctatcatgcttcatgtttgctggcttgcttgctatttgcattacttcatccgattgttattgtttgccacaggctaagcgagatgttcagaggttttcaatatttgcaaagagacagctatatcaacaagctgcttcccacgtttgcaacttgcttcttctttctctccatcttggttattctgaattcttctctcttgcaagtatgttacatctaatcctctcatgtgatcaactgactgaggtaccggcgtggcgttggcacggtatctgtcgaggactcgagggcatagcgcctagtactatgttccgaagtgccgtctcctcgtcgaggtcgggttcaagattgggtagagccacggacctggaagtcgagtacgagactgtacccaatcttgaacccgaccttgccgaggagataatactagtcgctattcccccgcctgagcattctccagccccgacagataccgtgccaacgccacgccggcaccttgccctacctactatccgggccactcccatttcaggagtaggcacgacatttgatgcgccatgagtcgggccgtttcgctcgacaccctcgcttatatctctgccgcagaacttcatgccgccatttccagctttgaaatcaaagatgtcgagaaggcgttgaaacttcgtctagaccaaagagacaaagaaacaaagagcttgagcaggttactcctatttctcccacagctcctaggtatggtgttctgaagatcaaggtattatagaactaacatgttgcagtggagtatctgaagctgattgatgaagcattgaattgatcgccctccacggaagccagtgtagggtggaccatcgatgccttgctactcaatgcccattcaatcgtagcagagcgcacatcctccgcacgctctatcaacgtccagccagtgcgctcgtatacatatgggccggtgcgatcgaagggaagaccgtgcgacaatccagcctatgtacgacggcaaatgacgaccacaatccacgaacgtacgggttgactgtacatgcggacagatttggttatgacttacgccgagaacggtattcacttcacacccgttgccagaatatttctgggttccacccgaggagtggtgataaatctaaacaaatcatggaccgcccagacaagatcgcagaagatatttgggagttaaaagagaccgcgccgtacatgagaatgacatcggttggcctacacgactgactccttctatcaaacgactcacctagagccggcaccaagccctgatctgttcgattgattgcgcttgcgtctacggctcctggttgctcaaatagcttgctaatataacttggttccgaattttcttgaaactatgagccgctatctcgtttaagtaaaaaagtggcagatcatggttgggtcatttgaaagaaccagcctaagagtctgataaaatccgagagcggctatagtaactcccatcaccggcgttgcagctgaggtagctcctttcaacttgaagttgcgagttgtattaagggcaaggaaaatagaatagttgactaagtctacagcatgaattatggagacattgtttctcgctttctttcggatgtttgaccctagttataacccgcaattttagtaatagaatgcaagcgccggtgacatgtccagagtaggtcagggacaatctgagcatggccacatcgtttagtatactttcgttccgccgacggaattcgatatacgtcattcccgcgtacgccgtatcggctttgcaatgacgtgagacatgaggctaatcgctttgtcctcgtccccatggttctagagagtcttgattttccgacgtttctcacctccgtcctctggtgaggcatttttattattcactcaggcacccgagccccgccacttccgtcacctgggcatgcttggcatgcttggcgcgctagtcagcgccctcaggcaaacgacgctagtttcactcggtttacggagaactccggaccccgtttctctttgctcttatgtacctacgagtactacaaaaaccaggcattttgactctttctccgttgtactgacttgcccctgctcaaattctaattggtcgcgtgactatcacatgtctaccctatagacaagcgcgctacgcagcaggtcctcaacatgtagcttctcagctgctgcctcgtctgacccttgaccagaagttacttgttcatgatgccaacacccgcaaggtcccacggcgggcgagtcgtgaccagcgcggctttcattatccgaaaattggaacttattataaatgtaccactgctgaacgcccttggggttgcagtcaaaggcttcgatatgttacagtttttttattcagtacaccgagccaccgtctggtctacattttttattttgtagtccatatcgaatgcaaaagaaacaaagccgagcttgtaacggaccacacaatttggaaagtaaggcgagtactgatatttacgctaacatatgttgtggctgtacggcgtaagcttggcttgcttctaataccgcattgcttgtcaaaggttaaccattttctatcaataactgtaatctgatgacaactaaatcagtccgtgttaccggaaagccctcagaccctcagatggtagtattcagctgtccacggaaattgcatccaaccatgccatgccactatcagaactagtacgcgagatgaaaaggggccggattggtgatcttgcagtccttggcgtggggagaatactgaagccgagacttaagatttttaagcaaaactaaagagttcttacactagttataaaacacggatatatcagccggttggtaacggattggctaggggataacccccagaaacccagaatccttgactaactattccccggaaatcatctgttcaacacagatccataaacccgatcacaacaagccacccacgcaacaccttacggagatgccgagtcggtcccgatgccacttacgacccttctacagcctaatcggaaagccgggtttgacaaaagcatttagccgagattgcagcggtccgtgtgccatgtgccgcggcgcaacggatctggatataattggtcgggaccctgatacataactgggcgagccttgtctagcatacattaaagcacttggcgaaagaagaatttacgtcatgatggggcgaaaagcttgcgacgtcatgttgggtggaacggccttggcgggatcaggtacacggcaatagtaggatgcaaacatgcatagcatggagaacgtgcgaggcagaaccatttgaaattacctgggtgcatttcgccatggtagaaagcgatgaaaaaggcatagcgctattgatgttactgcattagacacaggaatgggccccgcggcatgccgttttcaaaattagtcatccgtgcccagactcgtggacccccgccaagtgcgccaagtgcccccaccaagtgtccccgccaagtgccaagcggaaagattcccccgcgtctctccgcatcgggaacgcgccctcgctggactttcccgtttcggatcggccaaggacgtagtataagtccgattttcaatttaccatatccgttgcagcccccgtggagaagtttgctataagactcccgattccgccgtctcaatatcttttctttccttaccactttttccccaacttttttttatctccgcgcaaacggacggcccttgatttgtctgtaccgccaatatgtggacaaccaccagtggcctgagtggtcgatcgctccgggtgagcatcaccttcgtcgctgtcgtgggtttctcgctcttcggatacaaccagggcatgatggccggtctcctcaacggcgacgagtttgtcaagtcgttcccaatcctcgaaaaacccgacaatgcaactccttccgaaagcttctacgtcgaagtcatccgcggtgctgtcacatcctgctatgagattggatgcttcttcggcgcgttgttctccatgttcttcggtgagagcttcggccgtacccgtgtgatctgtatgggcggcagtgtcctcatcatcggtgcattgataacaacagtctgctttactggtcattgggaggtcggtcagttcgtcatcggccgtgttgtgtcaggtattggaaatggcatgaacacggccacgatcccggtctggcagtcagaatgctccggcgcacacaaccgcggtttccttgtctgcttcgagggtgcaatgattgctggtggtacctttatcgcttactgggtggtcttcggtctttcgcacgccggagacagcgtccagtggcgattccccgtcgcactccagatcttctttgctctggtcgtggttatcggcgccgctatgctcccggattctccgtcgtggtttgtgaacagagggcttgacaacgaggcctgtgtggttcttggcaagcttaagggctcctctccagattccgatttggtgctccacgatttcaatttcctcaaggcggacgtagaatcatcgaaagccgctcaatccggctggaagacagtctttaccttcggcaagacccaggaactccaacgtcttcttattggctgttccggtcaattcttccagcagttcaccggctgcaacgctgctatctactattcaacgctacttttccaagagaatttgggtatggaaaaatatctgtctctaatcatgggcggtgtttttgcttccgtttatgcccttgcgaccatcccctccttctttatgattgaaagagtcggccgtcgtaacctatacttgattggtttcctaggtcagggactcagtttcgttatcacgtttgcttgcttgatcgagcaaaacgagtcgaacgccaagggtgctgccgttggtatcttccttttcatcactttcttcgcatttactatccttcccctgccttggatctaccctccggaaatcaaccccctccgtacccgtactatcggcgcgtcggcctcaacctgcaccaactggatttgcaactttgccgtcgtcatgttcacgccccttttcgctgctcagagcccttggggtgtctatctgttcttcgcactgttcaacttcatcggtctgatcttcggcttcttcttctacgttgaaactgccggtcgtgagcttgaggaggtcgatattatctacgccagagcccatgtagaaggaaagatgccgtggcgggtcgccaatgccatgcccaaactcaacttcgaagagatcgctcaacaatctcgtgagctgggcttgagttccatcgatcatactagagatgagaagagcgagcttggtctcagcagcagtgacaatagacaggaggttgaggaagtcccggagaagcactaattattttgggtgaatgcaatgacgtgccaatgtgtggttgatggtgataatgtttgtgacatggttttttagttcaatttccttttggtctatctcttacgttcggtcggtccccttgacgtcttttgctgtggatatatcaacttctgcccaggtgatgatagaactgattgcagtgcccaggtgtttctggcatgtatatatatccaagacaagaatagattcttttcataattctatctattattctacttcttctacacaccaaggctgatcttcatttccacctgaataggtgagaacccgggcagtacagcaaatcgagttattttattacagtaattcgataaatctcctcttaatatggtccatatatgaaaggacgcgctctcaggccaggcaactagtgaattcgtcttcgacaagaaggctgaccagatctagcccaagaccctgccaattcacctctgttttggtcttcttgaacttcttgacctcgaaaagcaggctgcaatcgcatcgcttttgtcagtacctatccggtaaagtctattggaaggcctcgagcaaattgcgagcattttagatctcgatcgcggtatattcagccggacatactgtgtcaattatcagcatcgcgagatctagtggaaagttacggaatccggtgtgtacgtgtactttcctccttatctgatttcgctggatggcctctgcaagcttcagcacagacagtggattctggcagatttcgcgcagattacgaagcgctctttttatctcagaatcagattggccgggggaatctgaatctgatggcatttcagaccatcgggtgcgaaagtcttgcgtgtctcgcaatctatctttttgccaaaagtgttgcgccgcctgtacaaagatgtcgaggtttgcctcgatgcgcgtaatgcctccttcgatcaactggccgaatagcgctcaacaatgggcatggaccagatacccaggccgttcttctggtagctaataagggtccggtccttctggactgactcgtgctgcgccaagctctcccagtagattcgcagtatactttggcatgaagatatcatccaattgactccatattcgtgcttggtttgggctgcgcggaaaattgtgaactccccaacctccatcgaagacggtgatgcctgtgaggcgatgccgttgatccgcttctactagaactaggctgattcagtcaaatgatcatgccaagtttctctgggatatactcacttccgcggtagagagctttccatatcgggggatgcttatggaaaactgtcttttcgacctcagcggacgggacgagtatatgtttcttcgcacgatcgtcatatgtcttccaccactcttgctcatcctttatttcgcgacgtgacggtccttccccattaatccagacctcgttgatagaagaagcacagggtagacatgatggtaggtgggaccaccattttctgccgaagttccaagtataacttgggtccttgcgctggcccatcccgtcaaaaatcattgctgctgagttttcaaaatgtcagtatagtatttattgcgagctgctcttttgaatagcaagaaaattcacactagaaataacacaagtggtataatagtgggcgctggatataagactggtcgcgtgggggctgctgacccacggcaccggtctacaggttctgaactttgataagcaccaccggcatgtgtgcattcaccacatcctccgtcttccaaatatacaaataatagtataacccatgccaatcatagctaaagtagaatctaagagaaactgaggagatggtttccagtcacgagacgagagtttatggcggaggatatctcgcttcagcatattagcggagtattttgacctccagcatttagagataacattctggtaaagaacatcctgaagactcggaaattcttgggccggcatatcttttctcaatttcatcgtccctaacgaatgaagcaccctagcgctggtctcaacattcgctgtcacctgcataatcgttttaacagccgccaaaactgtcgcgacaaatgtaaaccctcgcattacggtcgctgaactctccattattctctggtttaccttatgaatgtcttcccttcctccatctatgcacccccagtactaacaaacaaccaggaggctctatccacctcatcctcgaaggctactatgccctaaacttcgccacccttccgggctcccagcaactcctcgcgcaactatggaaagaatactccatgtctgattcgcggtatctcacttcgcacgccttcgtcatgtccatggagtccattaccgcctggttctggggcccgttatcattcgtctttgcgtctttcattgtcacggataatccattccggcacccgctgcagattaacatctccaatggacagctgtacggggatgtactgtactactggacctgtgcgtttgactttctggtctacggggttgagtactctaggcccgagggatattacttctatgagtattttgtgctgttgaacgggttttggattgttattccgatttgtaagtaggtttttttcattctgtcgtttcttcagagttggtcagtgaactgttctaatgtttttagtgctcattgcccatagtgtgagagcttgtgggagggcttttgcggaggccaagagggtgagcacggtcggaatgaatgggaatgcgaagataacgtcttgaagaagtttgttcaacgccatatcggaactggttttatatacctaggcagtcccgatgctatttaaacgatgacaaaattacagttggtgagtgctgtggcattgggtctcaattcgccttttcggcaacggtcgtttagcaccgtcctacgatccctacgtaacagcctagggatagctaaagcaggaatgtttataacacgacaacatacaattagaagcaatgatctgaaagctatatttcaaagaacgtatcggaagtttgggttctgttaactggttagtgaaaagatcgcagaaaggaacaatgatatgcagtcactaacctcgaaatcagttagatctgccccagcactctggtcgacagatgactcgatatggcccacagcagaagcggcagcatctcgcagcttgtttctgcgagccagcacaaaccgcagcaaaacggccaaagcagcttgtgcagacgagcatgccaggatgagcttgactccggtctggtatacgggcgcctcctttgccagaaacgcgtggggtccaatgatattgccagcgcagtacgcaaagaaaacgaaggcaatactggttgtacgttttgtataaccacccaggtttgtcgccggcatctgcaaagccagtaccaaagagcagacgtaggcaccgatgatataataaccacacaacacgccgaccttgtatgtctgatggtccagcttccataggagactggcgccgatgacagtcggcatcaagtaaatgaacatgatgacagttcggaagtttttgattcgagatgcgagatatgttcctcctaggacgtaaaagatctggaatcctccaaagggaatacccagcgcgatagcagtggccgagtcattggtcaaccccctgataattagtttgccgaagctcgcgatcccaccatttacgacctcgttcagaagagtgaagaagaacaagatccaaacttgtggatcaatgaaagcttcacggatctgatgccatttgatctggtgattgatgataccggtctggccgagtcgaccgcggccaatgaggagggccttttcgtccaggctgaaacgcttcgatgagataacgtcatccgggaggaagaggagcatcacgactccccagacgagggtaatgccgcccagaatgaggtaaatcgctctccatacagcaatggtgtcgatttgtccaattccatatgtgagaattccacctaccatagctcccagtccgttgcagctgtagaagacaccggcacggaacggttgctgagcacgtgtgtaccacattccgatcatcatcataaagcatggggtgatgggggcttcgaagactcccagaagaaagcggcagatagccattccagtgaaggaggagcaggcggcagtaatcatgagcatggctccccaggcaataatgttcccagagacgactttggcaagctttgtcttctgtgccaggatattccatgggtattcggcgacgagatatgcaaaataaaagatactggcgagccagctgtattggttgcttgacatatgtgtcgaagagagaaggtcgaatacggcagagtaggcgagtgctgatttgtcgatatattgaagcatatacgttccagaaagtaaaggtaacaaaacaagatctactttgcggaccaatgccttgttgcgtggctcgtcatccaggagtgcctggatggcctcttggttgaagccatgttggcggaggaagacctctccttcatcgagatccgttatagtgccaatttgcacatccttctcgtcgatcgtatcgtccacgggtgatttcttgtcgatctccatgctcgccattcaatgagtaatgagtaatagtaaacaaaaagatatcagggagccatatatatccctcgaatccttcggtcataattttccgttatctttggggttttcccccgcacggtataacctagctactttcgaccggggagatagcgatccccacgatgctatacgtatttaccttcggctccaccaagatagcccccacacggtatgacttcggcgctacttttgaatcccggagagatagcgaccacgcccgcggtgctatatcttgctcccgaccccagctcttatctctcgggatttctcttcgttgatttaccactgaaccgtgatacaatcatgactgctgatgccaagtccccctccgtcaccttggcgcaaggccacgtaataggaacccaactcaaagacactttcccccaacccgtcgacgccttcttgggagtcccgtatgccctccctcctgtaggcgatcgacgcttcagaccagcaatcaaagttccgagctcatcagataccattgatgcgtccaagtatggccccgcggctcctggaaaggcacttctctccggaggaccgaagctcgtacagagtgaagactgcttgacggcgaacatctttcgaccggctggcagcaatgatgggcgcaagctccctgtcgcggtctatatccacggcggtgctttcaatcgaggagcggcaactatgcacaatactgcgtccatggtggcgtggtcggaacaccccttcgttgccgtgagctttggttatcgcattggagctcttggattcctgccttcgagtttgtcgcagaaggagggattgctgaatctcggattgcgtgatcagctgcttttattgcaatgggtccaagagaacatcgccaattttggcggtgatcctgccaacgtcactttgtttggtctttctgcgggcgcgcattcagtgaatctcccaattgctgatttctgtaatatttattctgaccaaaatctagattggccaccacctccttaattacgacgagcacaaatcaccattgttccatcgtgtcattatcgagtctggagcaccaacttcccgtgctgttcgcccatataacgccaaggtccacgaggaccagtttacagacttcctccaagaagtcggttgcccacccggtctagccgatgctgaaatctttccattcctacgttcactccccagcctgactgtaacaaatgctcaaacggctgttttcgacaagtacaacccttccctgcggtgggcattccagcccgtgattgacggggacattatccctcgcaagcccctcgaggcatgggagtcaaaagtctggaataaagtacccataatgaccggattcaacagcaacgagggaacaatgtacgtcgacaagaaaatgtcggacgcctcccagttccgcgagttctggcacagtcttctgcccgagctctcgccgtctgatctcgacacaatcgagaagctctatcctgaccccgccgttgatcccacatcaccctatattgaagacagacagggcgagggtctcggacctcaatataaacggattgaagccgcctacggacactatgcgtatgtggcaccggtccgccagacagcacaatttgcgtcatcggaaggtgttcccgtttacctttatcactgggcgctacctaggacggtcgtcggtcgagcaaaccatgccgataatatgtactatgagacctttaacagtgctatcacgggaatttcagaatcccagaaagagctgtctggcacacttcatgcctacttgactagtttcattacaaccggtgatcctaacgccgtgtctggtcgatatggacaaagaccggagtggaagcccttccagccggcggatacacaagttttgatctttggagaggggaatgaggagttgatcggaggtaatgttgctcctcctgcgaaatgtgtcgcagatgattgggcaagagaacagacagaattttggtggtcgaaggttccgatttcccagcttggttgatggatagaacgaacagaatgaattcatgctttctcgtgcgtctttttacatacctgtaaatgtctgtttagaatgaccagccgcgaactatgacgtcgttcatatattttcttctgaactagaaagtctatgaaaactcatgtgcaatattactatacaaaatgcttgtacttcaattcttgggatatttacagcctaattccaaataaaaaaaaggcactaaatggcttatgctggcacgcgtgggccaacacttctccagaactcacagcgctcaccacggccaccttcccacttcgacgcatctgccaggctgaactcattcgtgacgccaggtccttcccgaatccagtaagagaggttatcagtaactttctcgtagaccgttgttccacccgtggtgttcaaattcatcaacacgggagagttgctattccaccttggccaggagatatctccgttcgcacactcaggtacggtagaattgtctgcaccaccctttgcatcgacgatggatattatcggggtgtcattgatgatgaaattgccccaaatcttctggaatgcatggatcaaaccgggagtgggcgtagtcgccccaacagagaagtatgcggacagatctgccccatggtacccaggggtcacagagtattgatatttccagctctccgtggtattttttccagcaaaagcatccgcaagccagtatgaggggcagtcgaaggctgattcggcgtatatgtcgaagactgtctgctgaagaccggttgccatttccgattggttcagagcattctggccatggtcgcctagtgtatcgtatcggggagcagtgtcttggggagagctgtttcggaaaccgtagatatccagcaggcgggaatagtcactgcgggagaacaaagggaaagtagacttgacatagctcaggaagctagcagtggtgttcacaaatggcgggctaagcgggacaccttcattggcattgttctggaggacttagcataaacaaacctacgtgttggtatgatcaatggacttaccccagatagaacgcgcttgccgctcactttcttcgtgtataattgcttggatggaagctcctggatgaaatcgccatctaccacaggcaggaaggcccaggtaccccatgctcctgaaatggagacatttgcactggcgtattgcaaagtatcggtgtcagcattgacaaggcagtcgaatacggctgcctcggatacattgccaccattgtaacaccctgctcgtgcggcaaaatcctgatagtgacctgtcggcactttaccatcgtactggtgcaagtcagtggtataagggctggcggcaataacctatgcaagttagccagactgtctcagatttcatagcgctgtaactttacattattgaataagtggtcctcgcgaccaccataagcaattgattgtagcagcaccgagcctgctccagaagactcgccagcgatcgtgacgcgggaggcattaccgccgaacttttcgatattctcctggacccattcgagggcgaaacgcatatcaagcaggcctgcattggccttgccatacttgtgcactccttccgaggacaaaaagccaaaggcacccagtctgtactgaatcatgactgcaataaacccgttctcgtttgtggcgatccattcactggggtcgtattcggccccgaaaagcccatatccaccaccatctatgaaggcttagaatatgttctttcggtcaaatcttttttattttgacttgtgcgtagacttacgaatccaaaggagaacagggagatctttggctccgggcggagcatacaaattcaagaacaaacagtcctcattgcccagggctgaaccgaagccatacaattctggaagctgtgcagcaccggactgtgggcagagtggaggctgttcagtggcagattgaatggaagtcttgttcactgcaggggactgaggcggttgccatcgcagctttccaacaggaggggctgcatatcgaatccttcagacaataagtaaatataaaaaaacacgctcgttaagcctaatacggtatgttcttaccccttgaagacattgaggtcgtaggtgttgtcatagtaaccctggtaggtggcgtagtctaaatcaaccactgggctcgaggtttgaaccggagtagccaaaccagccggggcagtggtgagagccaaaaaaacaaggctgcttattccggcagcgaaacccatatctgaatctccaccgttggaatcggatgattggagaggaaaagagacgggacgggtggtatttttatgagacgatagtgattggtgaatacgagcttcttatgtacacctgcaggactgacagccctaagcgacctcgggagtccacgggccatgtaacattcctgagagcgagcggatcagcccgaatgtcccgttgtttattgactccactatttaaaggggtatataatatactatgcgtgtcctgaatggttgtgttgttagtgtcgagcttagcatatcatccaggccgctactaagcgattgcaaacactctgattgctccatccgtatccacaagcaatatacaatgttcaaatgtgcagaacacgggagcagcaatggggcaatgggggccaaaataaggagtaacccctaagtaatagacgtaaactaatatatcgctcaacggtcggagtttttttagaatccttcactctccccgtaatggcggaggaagtcgatttgagcgcgtcgcgggtcaccaccgtgactatatgctattcggttcccattccattcatgattttgtttactgggctccggcttttcgtggtactgcgaccttcatccaaagatccgttgagctttgatgattatatgattactttttccacggtctgaaccaacttttccttccggatcttgctgttcttgggatatccaattttctaatactgctgtaggcaatatccattggactctgtataagtggcttggtgtatggtaggttcttatgccaagatatatattggattcttgcaagggtaaggctgacccagattgaactttattatgtataggtccaccctacggctttgggagacatcaagcgacgctcagtacccatgaagtccaaggtttcttgcgggtgatttcaacagattcattatatcaatttacatactgaacattccgaatagggcgactatatcttcagccatttctacgattgggccattgcaagcattaagctttcaattcttgggctttactatcgcatttttagcacggtcgtttttcggcgagttatcattggcaccgcagtctttattttttgctggctcgcagcgatggagatcggcctagggctacagtgtatccccattgagagaagttgggattcggatgttaaggggacctgtataaatctggtggccttctcctacttcaccaacatcacgaacctggtcagcgacatatgggtctttcttcttcccctaccgattatcttcggactgcacgttaatcgaaagcgaaaattggagatcgctggtgtttttgccattggtctattgtaagttatgctctacgtcgactggaattcttctgacctgtttagcacctgcggcgttactcttgctcgcttaaccgttgtggtctcacaagggtcgtcggacttcacttgtacgtcaaaaaatatccgattcagtatccacagcgctaataacaggattaggggctggtgttccgctcggaatcctgtctatatacgaagtactttgtggaatcgcctgcgcgaatctcccctttctttacaaactagcaatcgggcctttcaagaagtctgcctcttaccactcacgtatcggagagtcagagtccggagcagagtatagagctaggcaaaatagctcacggaggcatacaaaaacactgagtatgcacagtgaagggaggatgctctcacggaatgggaatgattcgacaacattgattgagacacgatccaatcaaaatcccgagatagaactctcaatagtggaacgatcgtattccatgtctcgatcagatagccaagaaatattacggaaataaccatcaattgataaatgcacccaaaatgttggaaacaggcgaaatttattttagattcgatgagaggggaaaaaagtataaaaaaagatattcgacagcacagggatttgaaccctggatctcgaaagaactagatttctcaaattaggattcaagtctagcgccttaaccactcggccatactgtcggaacttattgtgaaaacccgtccgacttgttcctttaaccaaacatgtgcctactagtattttgaagtaatattttccgtattattttcagtattttatccaagtcaatggtattttctcaacatatcaccttcatctcggtgctttccaataagatcgaatcgttatttgtccataaaaaatgttctttctgattcttacattgatctccttttcttatttacaaatattaacctcgttcaactttgccaaaattggcttttttaagctttcttgtcatccatggatagagtgtgggtctttgttgtcttgctgccctcgtctgcgaccccacacatttcctttctttgtacaaacaatactctgtacctccgtgctgcgtgtctcaactgcgtctttctggccctgccgtctcgtcaatattttgtccaatacgtgcctggttaggtatctcgggacctagaaattccgtgccgatcacggggttccgaatcaacacagcaccaacttcgagttgcaacctccaaaccttaagccatgtcaactgcaactagacgaggagtgttttcttccgctatttcaggctacacccgattcattttgcgcgcccggattttgaattcccccagaatgcaccgatcttggtccgcaaatccacgggtttcttttaccacctcaattcaaggtcaggtatggtctccacgggttttcagtctggtaagcctagcttatgctgaatgagattatctattcagaccagagttgggacaagccggatttccacctttataccgccggtcgctggctgttcaacgagactcaacagctagctgaaagacgagtgaacttcaattttgatgaactcgtgagagttgccatggagagcctggatttcggcccccatgtctgcacggaagtggaaaagctccccgacggaaactacagcaaagcattccttctcaccacggaaagcggacatcaactcgtagccaaggttccaaatccgaatgctggtccccttttacacaactgcgagtgaagtcgccaccatggaatttataagttcaatgaccccattgttatggtccttcataataactctgggcaggcaagtaccatcgcaggaattccagtgcccaaagttcatgcctggaataatagcgcagaggataatgctgtcggtgctgagtatattatcatggagaaggcaaatggtgtcttattaagctcacagtgggcaacaatgagcaccgaccagaagcgggagttgatccaaagtatcattgactttgaacgctcccttattgctcattcttttgacatgattggtagcatttactatgaaaatgatctagcgaactccaaagatggatgtttgtcaacttcattccctagatttgcgatcgggccgatagcggatcgcaggttcctggaagatggacgaagtgcgatcgagtcttataaaggaccatgtgcgtttttctacctcttgaccaccaatgcctttgtctgacgtgggttcagctagggaatacaatgattgactatgtccattcgatggcgagtcgcgaagaagattgtagcaaacatcttagccgattccccagaccagaggggatttttggcgcgcccgggtcatatcagcctacggctcaagcaaaactcgatgttatctctgatttccgcaaaattgcatcctttatagttccgaaggacgcgaccgtgacaaagcctgttctctggcataccgacttccatgcggataatatctttgtggatccaaataatccttccaagatttttgctgtcattgactggcaaagcgtacatgtcgctccattgtgccaacaagtgattacacccgcattcctgaatttcaattggccaaagccagatgaaggtctttgtcttccttctcttccagacaatttccagacattgagcgccgaagagaaagccaaagccaaagtcttacgaactcaacaattattatacaaactttatgaaattcaatctggacgacagaataaggatgttttcagagcgcttcagtatcccaacgtacttggatcccagattatttcactcgtatcccaggttttgaacgacggtgaaacaattatcaagggccaattgtttcaacttgttgaacagtggagaacaacagttggcgcagatggaacaccgtgcctgatcacctttactgatgatgatatcgtgcagcaaaatttagatcaagagaagtgggaagaaggtgtgcagctcatggaagatgttctggaagctcttggcggtgcagagaatggttggcaaggctgggtaagtcatgatgagtatgcgcaggcgaaggtcaaattggagatggtgaaggaacagttcttggatcatatggcccataatccagcggagagagaagcacggtgctgggcatggccgtttcaaggtcaagatactcacactgaacatgattggctaagagaggagacaagcaataaccacttgagactttgataaatgccaaggatggcccccaagttgacttcaatataggaaaagtgctcaaaccagctcactccaaatggaatcaaaagcgtttattatattgcacaattacgctcttattcactccatgttaaagctacagaatttaaaaatgcggtctctttgttttcctgctttctttcatcgcctttccacctctactacctttcttcttgaacgcgtctttacattcggattattccaattttttgtgcgccagtagtgtgcttcccaactactatggccgacgtgagggattctgttgaaggaaacgtctctggagacgaggaagacgtggacaagcaaggacttcgggccacagaacacgatctggagcaagccaattccaaggctgtctttaactcgaagaaagcactgtggggattcttggtgctatgctattcggtacgcggggactgatgcttactttggattgacatctgcttgagcgagatgacatgctgataatgcattcgcccaattccagactggcccaacatcttccatggtttcgaattatgtgactgcggccatcctctcggcagccaatctcctgggccaccaggccggatctaacaagccatgctcacgccgtggaacaaacatcagttgtctagtggaattcggtggaggggagatcgactataacagctatacgtgcgtatcgtggcattgaggtgcggggtgactttgctgacgagaagaaagattgtaccttcgagcaatcagtcgcgccatggaaggcatagtatcgattctcacggccggcttagcagactatgccagtgagtagaacgaattgacacctttggatttttagcgctgatccagatacctccagactaccgcaagacgatgatgatgacctcgatatttctgttcggggcattagccttgccttttgcaggactcacgggtcagagttatagccatctgaccgccttgtctgtgctatattgcttcttaacgacggtcggaggtgtctatactgtgatcgaggggtcatacattccgatctttatgagatcgacgggctggttccgtgactcccttgtagcggcaagccaggacgagagagcgacgtggaacaaaggagtctctattagtgttctggctttggtttcgggcaatgtcggtggcttgactgccctgatcatcggtgtcattcttgtgtatgggcgggggtcttatgtgcaggttgggtacttcaactacgttctagccatcacaattgcgggctgcatcacaagtaggttgtacttagttctagatcatgaatccccgatagctgactttcccagtcctgtttgcattccttggccagtaccttctcccatcagtgcccggcaaaaagctcgaccgcacgaaaaacaaattccctctgctgatcgccttcaaaaactggctgaaactgctgaaaagcgtaacgcactattcggaagcattcaaattctgcatcggttgggttctatggaacaccggctattccaaccacctgcagctcatcggcgcgctcttcctccaggtcactggattttcccgcagttccggggtatactcggtctggtcctttaccagcgtgatctttgcctgcacaggcagcttgagcttcatgtatctccaccggcgacttcggctccccgtgaaatcatacgcatatgccttcctcgtggtgaatatcctatgtgtgctgtggggctgcatcggaatcagcaaccatgttacaattggttataagcaccaggtcgagttctgggttgagcaggtcctgttcatgtcgactagtagtgcgcttcgggcgtataaccgtgcaatctactcttccatgattccggagaactcggaagcgcagtttttcggtctggagatcactttggatctcgcgactgggtgggtcaatcctctggtaatgggtattatccaggatcggacgcataatttgcgctttccgatgattccgaacttgtttctgatgcttgttggacttggtctttactcgcaggtggatattggcaaggggatccagcaggcaaaggtaccgttggtacagtaggttgacagagagactggagttgggaggtttgatcatcgttggatagaaaacaggaaaaggcgatcgttcttgcggtcggatacaccgccgatctgtggtgaaggcgtcgcttatgctgaaagctttggtgtcttgtcggggcttttcttgtattgcctggttctcaatatatatttgtcgtgaccaacagtatgaatgacccctggatttcttttccgaccacaaataaccgcagctttagatactcctgttttaattagttcttcgtcgtcgcttgtgttgttatttacggtagaaagtccttttagactgccgacaagtatcacatcgcatactaaagacatatagttgctacatggaaattgaaaagactacggtatattctcttcaagtgatcagttatcataagcagcactaatggtgtagtggtaacatataacacttccaagtaatcatccgactactaagttatgttgtgccgggggttcgattccctcttagtgcattttttgatatttttttctttttcatcgtgacatgagttagaattctattgtctctctctgtacaacgaaagagaagagttaatggattaatgttctgatctcaataactatacattctgcacaatgagttcacatgtaaccagccctatgaaccacctccaccacgtaaaacaatcatctacaccaggtccaagaccaaatagataagtgatctttagttgttacacgtgtatatatacagactatgaagtacagcgcacataaagttgacaatgacattccatatacccataaagcaaaaaataaatcgaacaaaaaccaatgcaagaccacccccatgttcgccgcgaaacgccgtgccatgatgtattggggacaaaaaatcgcgcatcaactgtagggggtactcgcgagaaggggaatcagtcgaagaagatagacaaatgagatgcgagagatgacaaaagagacaaaaaaaaaatacgacaaatgagatggcagacaaaagaaaccctcaaccagcccagctcccattttgtccagcagagtagagacaagctaatccgagaaagctgtcatgagatgggatatgatagatgcggttgaagcaaaatcagaaaacaatgcggatgggatattcgggcacataaacataggaacaaaggaaacaaaaagggaaacaacaccgggaaatgagatcgtgtactttttcatgtccagcatctgggaaacaaaataaaacgagacgtgggaaaggagattcaaccaaggaaatgaattgtccatggggttattttctcggtgctcgcaccggaaatgaccaaatggcgcaatgattagtccctgtagaccctgctacagaggattcgagtatgattatacagtacaaggaggaactccagcctccgattggtatcagtatcaggttgtagatgggatgggagcagtgccagtattagccgttgaccatgtcatccagggccatcttgcgccgtttgatcggtctgttgtcgtgaccttcagcttccatgctgggcggttcggccctcgtcagagaaggcgagtggccagatgctatctggatcggggatggcagttccactgggccaaggtggcggggtatgggatccatagttgcgcttgttatggaggaggagcgttggtgggggagagggtagttgaagaccgggcctgcagatctgtggagaggtagagcgcgggggtcgtaaaggggttcttcccggcctgggagagtccaattcattgggtacgggtcgctcaggcgatggacatggtgaggagggggtggcccagctgtggcttggtggattggggggagccggactggagattcgacggtatatggatcccgaggtgatagtgatacccgtgaatcatttgccgttgggcggataggattgccaggcgtctcagtatacggtagaaagggcataccgactggtggtggctgatgttgaggaggtgatgttggtggtggtaatgctgggacaccgtatgtttggaatcgtcgatccatgccaccggacatagtgttgacttttaagaccggattcaaccctgccattggcatgtacggcgaaggtacatgtgagtgcgtcggtaccgaataagatggcggtccagatgaagagaatgggcgtcgaatcatacccgggacattgggcgagaggtccataggccgcgtgagaggaaataccgaagcggaccaccggtgtggtgtccgtattcccgagctgacatctcccaatccctgtagatccgtcatgggacgcagttctcgtgaagaagtggcccgatgcatagcggtccgccgcgggggcatagttggctgagcctccgctgggacagccgggttatccaagtgcgtggtgtatgacttgacagatgaatcctctgcttttaatgggggccgtcctcgctttttgtgcgtgacgtccacacatgttgactttcctgctcgttagttacaattccactattcatgagaattcattaacacttacagcctttccagcaagcacacatcttcgacatggacgggctgggtcacatccaagatgctttttcttgcaattgacacaagctgatgccacatgggcctttgtacgtcgggttgatttctgtgctagtgatcggcctgtgggatgcgttgggtccaatgttggtgctcctgctagcaatggagatccagcatacaccggtccctgttcgttatatccccgtgacagtggctcattaaccggtatttgcgatagctccaataccggcacagcagaccgctccgtgaatccgagagagggaggatatccccgagggatctctgcggatagctccgagggctttgctggaggagatccagacatagattggtggggtatcggagcccgggggctgcaccctcgagcattgggggtccaagatcgattcaacggcagccgctctgggccctggttgaatcggggctgtccgaattgggatatagtgaggctcggggggtgaagcacgagtgagtgcatcggatgtcaagcaggaaagggaaagggcccacggggcaaatgcttctttcggcctttttttgttttttccttttttttttcgttctcggtcttgctggattccgaagtatatcttggttcaatttcacaagcagagaccgctgaattgcgcggttttttgagacagcatgtctgagtaatagatctgggagtaactagcgacacagaaagcgcggtgtagggagaatagaaaagagccagaggtcatcaaagttcttccaatgccgtccgaggacccaagcttataatcaaggtggatcgatccgctattggaggagtcagaaaatagactgcatcgatggggagatttctagatgacagcagggcacagggttactcatacgcatgtcttccctagggcgacttattgcaggatggcggtcgatcattgagctaggatcaaggtgcagtaaaatgtcaaagtccccaccccacgccttacctcttgatcacacgttccacgttcctcgagggtatttttgtgtaaaggggagaaaacggtgaagtatatgaccgaaagtggtgcgaggtcgcccaaagtaggggaataaaaagtacacccccacttgaatgttcccaaggcgttcgatagtccaaacgaaccgctgaactatcacacaataagcagtgtaggaaagagtagtggtccatgcaggcgctagtagctgatagatttgatcttcgtcatggtagatcattggagaataatgggtttaacgggtgcccctccttagactcctttctttggaggcctggtattagatacattcgatactgaaaaaagagaataaagaatatattgcctcctctccctcctcccccctcccccctnnnnnnnnnnnnnnnnnnnnnnnnnnnnnnnnnnnnnnnnnnnnnnnnnnnnnnnnnnnnnnnnnnnnnnnnnnnnnnnnnnnnnnnnnnnnnnnnnnnnnnnnnnnnnnnnnnnnnnnnnnnnnnnnnnnnnnnnnnnnnnnnnnnnnnnnnnnnnnnnnnnnnnnnnnnnnnnnnnnnnnnnnnnnnnnnnnnnnnnnnnnnnnnnnnnnnnnnnnnnnnnnnnnnnnnnnnnnnnnnnnnnnnnnnnnnnnnnnnnccccctccccctctcctatctaggacatcgagggcgtgcatttgacagaacgctgtcagtgccacccccccgagcgggtaaagggaagggattgaatgccactagtcaacggatagttcttttcccttttctttttctcgttttttccatttttccgttcggagaggggtgacagtgtataccaatcagggctaagcaaggtggaagattgacggatcgacgtcggtgcccgcagccattgccaatagtcgacctcggcgtggactatgcgcattccgagtacgggaggacatgtactccgtattttacgcatttaattctattctagattggatctaagatagcaggagagtcggataggaggatagtaacctcattgaattgtcgctggtggtcttagggttgcaatcgggaggtcaccttgaccttcacgtctcctttgggcaattataaggtcaatcggagttctttcgccttagactttgtgtcttgaatatttaatttccattgaaatgtcctattccttcttccccagcgaattaatcgccctaaatctagccaatctgaatatttcgactccacaacatcgcccggcagttcgatgatctcccacttaaaccctttaaatgctcctaaaacccttgaacccttttaaacattgagaaatccccttattctccgatccacccgggtaaatcattgtatgaccgagtcgatccttttatgctccgtctaggggttactgttacaatcgcagatcagagatggaaaggtctcacagggttttgaccgtggtcgagtcggacaagtgcaggcaccgtaaatgtccccttttttctcctttttctcctttttctttttggggattttctggaaataggttgcgggtgtgataccgagtctcgcaataatcagtttcctgtgatacccacacttggggggcgtttttctcgcttttttttctctgcgcttagactcggactttgtattggaaccggtggagtgatattgaggaaagagaagaagcagagggtcctgaacggtcttaaatggtcccaagggctccaaggagaatatctggaaaaggactcggtgtctttatttttccggggaccccaacagcgatgtggctgcagccgggcgatcacattcgatcacattgtcctttgcctctgctctgcgcgtgcgcatgccgatcaccatccctggctttggaactgcaggattccttggatctcacgtcatggggagggagtgtgtggtatatccagagcctaatagctgatctcctcctattcgttgtatcgatataaccactctatggtgttataatatagcatagagtggtgtgatcatatcactagttcatgtatatataaactcggcaggatccgatcaagggaaaaggggtgtggaacatgcggcacgcggagcagcaaggggtctgtcaccccgttcatgcaggatattaaatagtctagacaattatacggttggttgctttgtgaatcttttccactgccaatcataagcctattcgtctgttatttgtgcagtttatactaactccgacctctcgcggtatagtgttgtagccgccgacgtgcccaaagtccagaccagactatgttatagtccagactctattaatttgacgagtggagctcatcactagcactatttaattcttttaatctaaattcctgatcagatcaaaaatcgccgaatcattggtttttagcgttaaatagttccggttagtacggagattattcggaacttgggagaattctcctagtgcaacgtctaaaacttgagacaatgtctatagtttctatagttccatatacttaattaacttgacgtgccgccaatccagatctgggcatcgatggacatcctctaacctcttaacggtgaccaaagcgtgtgattgggctgatatcacatcttcctccatcacggcccatattgatctacagtttaaacgtgatggcctggcccagtgccaatgttgagtcagtcacatttccaatcggtctccggatactccgttggagtctaggctacacagcttcttccatgtgctgagctgggcggttcctaaatctcggattcatactttggacatcggaataaaatctccgaaacacaaattgtggtatctctgcaatatagacatctattctacagtaaactttttcctccgtaatcccctagcgtctcttcgacggccgggcattcttatcgcgacgctgttgcacctgcttccgcgccttgcgaatatcctccgtagaccgaagttcgctctttccgccgtatgccgctccaccaagcttatcgtgctggcgttcgcgcgccgcgtcgttcttcttcttcatcttgtcgtagtcgccacgcagaggatcggcccgcttaggcgcccggtcctggctgtgtcggaatcggccactgctcatgcgcgagttgacgttgttcatattaggcgtctcggcctcgccaacacgaggcatccgatcaacgcgcttgcccttcttccaggcctggaagcgaccgctgcggaaactggcggcgatcttggctccactctcgccgcgcacgagtcggctgcccttggaaccgtcctcgtcgttctggcgggcaacgtacttcttgtgtcgcttgtcccagcgcatgatggaacgcgcttcgccgaacccgcgcttgccttcgtcgccgttgaggtccatagtcgcgttgcgggagtcgctggcaaagttcgagttggtacccgagtgcacaccgtaagccttatcttcggccatgtcgttgtgctgaggtgtgtagcccatgaaataatccgggttctggaatgctgctgctgcgtcttttttctcgccttgcttggacttggagttgtacgcagagaaagtgacttcgaggtcatcgtcggatgcgtctgacatgttctcgccggcatgctcggggatgtcctcgtcctccacttgaccatccgggccgggagtgggcattccaagcgctgccaactcggcctctgctttggcatccgctcgctttctcttgttctcgacactagtgcggagtcggcgaatggtgtcaacggcctcgttgtcagccactttgccgcctcgtcggttgttcgcctcgaaaatcgtttcatgtgggcggtaaccaccaatgcgggccagcatactctctcgctctacttccctctcagtggttgcatcattgaagagcgggtgaatctcagcccagtgatcagaagacacaacatccttggcccgtttggcactctcggcagaagccgagttgcgggtgcgcagatatagcttctctcccttttgagacactcccttttgtccgtaaatatctatatcatcgtcgagcaccttctgtacccattcgcaagtgcgagagattgcctctctcggcagcgttcccacgacaacatcctctgcaaagttgacttcagtgccatactgacgaccgaggaccaacctgcgtcccaagaacagctgaagatccagaagatacggggcatctttgtcgcgaacaagactgtaactccaacccttttggcctgcacgagccgtacgaccgacacggtgaatgaagatcttgggctgtgaggggaaatcgtagttgatgacgttggcaagaacaggaatatcaatacctctggcggccacatcggtgacgactaggatatttgagattccggatcggaagttttgaacatggtgattacgagcagtctgatccagggaaccgtaggcgtaagaggtggcaaaccctgcctcggtgagaagagagtagaggtagtcgacgtgatgcttggttgcagcgaacacaatagttgagtgctcggtaggtgactccttgaagccgctcgggagacggacatccgatctcttgcgcttccttgtcgggttctcggcttcttggcgtaatctcccgccaatatatgtctcaccggtaggcatcttgataatgttatgcaaaatatgtagtagggcaccttctttatctgccgacttcacagcaaagaaggcattttgtagatccggagaaactttgttctcgatgtccagacgaattagacttggctcttggagaccagcacgagcaaattcgacaagcgacttgggcaatgtagcggaaaagagaagagtctggcggttcgtgggcaggccgtgcaaaatctcggtcaactgtgcggcgaaacccatttcgaacagtctgtcggcttcatcgaagacaacatacttgatgctagaaagatccatgtccatttcgaccttcaagtgcaggaatcgaccgggtgttgcgatgatgatatcggggttgttggccatcatgccgaactgatcttccagactgtcaccaccaatgagaagcaccgatgtcaaatttgttcccttgcccatctccttaacgaccttcatggtttgtagagccaattcacgggatggggacatgataagagcacgtgcaccgaacgaggtgctatggctcttcaacttctcaatcataggaataacaaacgaggcagtctttccggaaccagttcgagccataccaaccacatccttgtcgtccatgatcatgggaatagtctttcgctgaatcggggtaggcacggaaaatcctttgcgggtgatcgctttcagcagactcatgctgagacccattgcctggaaaccaccacccttcttcaccgtacggcccttgagatttgcgccctttcggttggcggacgcctgcgagttcgcaatgaaagccgcatcgccgtcgtcttcgtttaaaaagtcaagatcttggtgggtatcgggcttctggggctttttcttggggggtggctttgcgccgtcatcggaatcgctgtcatgttcaaaaagggattttgtgatgtcgaactcgacctccgattctgcgggtgaggcagcacggggagccattgttgcggtatgctgtgaagtctcgactgatatggaaatgcagtgataagcgttagaccgtttggctcttcaatggccggggaatatgaaacacagaaagattggcagtgattaattaatgtatcacgcgaacaaatcctcgactactcaaacttcagacacctgaagaaaagtcgagtcgcttatctcgctgtctttctgtcgcaaaaaaaaagttgagagaatcgtaggcggtgaataccggatcaaccatcgcccgcgtgcaaactaaacaaacagaatttatacaatttgcgctgaatgtggtcatagaaacattgtctatttggagtttcaaagatttacagagacaagactgtactatacatctaatatgtacctaatatgtacctgcattgtggttcgaaatctccagcagctactcgatgtgcagcccagctggatgaagacacattggacagtccttttgaaatttcaagatagtaatcatcaaaagatagcattttaagagtaatcaatcactacaaaagtcaatatagcatctataatgtcgaagttcagagcagacgattttaagtagatccaattcgagaggcggtctgaaatggcaaaacacgatccccgcgacgcgtgcgacacgctcccaattaagtaaaatggtgttgaagaaacagctgtaccttgacctttccccttcacaatctcacatacaccatgggtatgtaccactctaaatctaagctattactctagccatatctaataatattgtcagacggcagttacaacaattatagctcctcattcggcgggggtggaggattcatgccgggcgaggcgaacagtcccgcgggaggcaaggtatacacatgatccaggcctgtctttacaacaccaactgatatccaacgcagaccggtgaccgagacaacaaaacccttcgacccgtgacagcgaaacaagtcctcgatgcctcgcagcccttccccgaagccccatttcaaatcgacggcgccgacgtcgccaatgtcctcctcatgggccaaatacgcaacatcagctcgcagagcacaaacgtcacgtacaagattgacgacggcacgggcgaggtcgaggtcaagaaatgggtcgactcagccaccgcagactccatggacaccgacgatggcaaggcgcccgccgatgggaagaccgaggtcgagctcaacggtcacgcacgggtctttggttccatcaagtcctttggtaacaagcggtacattggtgctcattctgttcggcctttgacggatatcaatgagctgcatacccatctgctcgaggccacggctgtgcatttgttcttcactcgcggcccgcctggtggtggtggtggtgctgctgctggcaatgctggcggtgttgatgctgttatgggtggtgcggatgattacggtgctgggcagaataaggctcttgcttcgatgtcgcttgttgcgaagaagatttataacctgctcaagacggagcctcaggatgatacgggcctacatatgcaggtcattgcttctaaattgaacatgcctgcgtctgaagtgggtagggctggcgaggagttgcttggggctggtgtgatcttttctactatggacgagcagacgtgggctattctggaatactagagatgagtggttgtgtctttaaacgtcacattcagactccaatgatattatgatttgtcttgtataacacttgatagagtcgaaacatgtagcaaaattgacaacaggcttgggtcaaaacaagattggaacataaatcacttgaagccgctaatgcaaaacgagatataaagaacatatgctggaagatttgaccattttcgtcatgaactgcatatcaagtcgtgtgcatgcttctcatataccaagggtcaagttaggtcaactcattcctcttgatagcttcctcgaccgagcgattccaattagctcgactgataaaggtggcctcgatgagcgaaacaaggcccaatgcaagcgcaactccagtccacaagcccataacaccccaacccaaagcaaaggttgttcccatactaagcggcatggcaatcacatagtaacagaagagttggatatagccgcccacctcctggcgacccagaccacggagaataccgttgcagtttgccgagagagcgtcgaaaagctggaaggctgcgcagagcggaagcacctgcgctacaatttcgacgacttcgggatcggagctgaacaacctagggatataggaccgcaaagtcgagagaaggaccatgttgaacacgccaacgatggctgctccgaagaagctcactttcgcagaggtctttgcggcatcgaccaaggtagccccgatcagatttgctatccgcgtgctacctgcaatagatagggggaacggaatctgccatgtaatgctggagattgttgctaggatggactgcgctgcgagtgcggatgtgccgaggtagcttgatgccagcgtcaaaatttcaaatgccaggcactctgcctcgaccatgatcagccctgggagggcgagacggatcattgggccccagttctggaatgctcgtctggtgaatccgcaccaacactcggatcccacgaagaaataaacatagatgaacaggcaaagcgggaggagattttcggttattacgacggcgattggcgccccaatgaagccccattgaagtttcttttatacaagtcagtattgtcctcgtaaaaggctggaaagtacctacccagacgaagaaccagttcatgaacgcattcagtggcgcgcagaaaatgaggacatatagggaggcagaaaacacaccctgggcctggagatatcgcttgccactctcgaaaagagcgaatcccggggtgcccaagagagcaaccttcaaatacagacccgccatctgggcgacctccttctctggcacgatcttggcaaggatatgctcagagaaataccagagaaacatgatcggaatggtgataacccaaaggaaatacaccatacgcagcatctgcaggcccaccaactttctctttccagagccgtaggcctgcgcacagagggtatccaaactagttgacagacccgagtacaccgcatttccagtaattgtcacagtcatactcgccagactgacagctccaagctcttcctttcccagatggccaatggtaaagatactagccacagtcaaagaatactgcagtaagaaagtgaccatgagcggcaaagagtatttcataatgacctttgcttcgcgctgccatgtcgtctggatcaaaccggctgcgacggcctctccccatttccgatcaatctcttccgagtccaatccactgtcctcggcatcggaagtccgctctctaagtagagcagtgatttcgcttgccgcgtccgactcatgatcactgcttctcgagcgtcgagaagctccacttggccgtcgagaccgggatccttggccgataatattgttgtcactcagtagctgccgttcctctccgatgacttgatcgcgctcgctttgggaaatggcttgctgttccccagcccatgggaccacagtcgcatggctgacagatgtcacataactcgggcggcgatatgaaccggctaaagagcgggggttggtgctggtatagctgtcgatccggcgggctgttgaagtgtcggaatcttcatcggtgggtgttcgatcctcctcgctgtagtctgcgaggtctcgggcaattgctgaggcggcaatgggcgagctggatgtgaaggaacgaccaaatgggctttgatactcggcggaatccaccgagcggatgttgcgggccatgataagatgtgagagacgagtctatgggtgttttacggccaccgcattatttacagccagataattgagctatctcggggtgagactctagatccttggagctttggagatatcgaaggcaaaaagcctgcagagaaaaagacggcctaaagctggatgcggagatgtatttgtaataccagcaatacgaccggtccaggtgcagacactctgtatatcgtgtaatttaccgaaacagcccccgagtgataatgcagataacacttcagtaagggatgtgagtcaaccaccggagcgtgtgattggctgtcactatcacatacaaggttcttctttactaaatccagtgcccgaagacgacgctaaatcataatcgcttcttcctaaaccccgctaacacttagtgggaagctcgatgcgggcagtgtcgccgtgatctcacttgatatggccacccccactatgttgtaccggacatgaactcacggcctagcggtaaaggcatcgttagtaaggatatgatctcggccacttcaacaatcgcgtcgctatgtatataaccgaggtgatattaccataaagaacgagcatagatctgcatacaagaacctgatcacgatcgtcctagtaatgtgtgaacgctggggctgtcgatcctcagacctgatcgtacatccatactccatactccgtacagcatactccgtacaacataacagatgagcaatcagaaacgactgtgacatcattcccaaaacagtataggctatcacatgaccggcctttgaccccgtccccgggttttctccagacttcggggatgaccgagcgtgtatcaaccctctcaccatgtcactaatggtgacacaagtaggggttggtcgtgctcgcttcaaccctttggtcaacccggtaaattcgaagccggtcctcgtggaagagtaagtcctaaactgtccaagcaatcgccgaacgagcgcgaaatggctggagagcagaacaatggcttggtcccttacatgacgctgtacttcaaaattaaagcctggcatgcgccatgaaagccatgattgccatgatttacacacgccccacgccacattctgccgcagtgacaggccagcccggttgacaattttaaagacacatcgagtcccagcaccacatcttcctctcacgcccttacctcggcgcgctcttattcgaaaacagctcttccgatgcccgcgaccactgcgccaacgagcgcactttcctttcatggctccgtctgtcgatgtatctggcgatcgtgtcgatggccatcatcatctccttccatttccgcgatcaacccaccggcctagagagacgcatggccttaccgctcgggatcatcttttggattctgagcttgacctgtttggctaatgggtttgcgaattactcgcgtacggtcaggaagtacgcgcgcaaggcggctttggtgcagagtggttggaaaacgcaggttgtctttacggtcgttgggacggtcattctgggcagttgcatcttgtttttgtccacagatccagcgcggtaatggtcgttctggggtcggatttgtcgatttattccattagcgctggcgttggtattcttgggcattttggttgctttctacattcgttattgtattattgtatttaatgtccagatcaggtctcagagactacttggtaatattcaaagaaaactcgaaaaatctcagaaccaagcgttgaatatattgtaattttctcctaaaataaacagagaggccaaagatcagattatgatgtcgcgagaagcgtcttgtgtgcagaggtatatttccatgaatctcgtaaaggaggctgggtttgctccagggaatgcaaatgacaaaagaaacagcgcatagaccgaaatggaaccaaattatacgataaactatacgtcgggacatttacatccgacggatttcccgctcattcttgtacttctccagggctggtgtaccgaggtggctccaccactcgaagagcatggagttgcagataagcttgaaccagggggtaaatgtcaaaccgggctgctcgaacattgccttaagctcatcagctgagacgtaggtggtgtctcggacctcgttggggctgggatccagatcgacatcggcctggatgaagaggatatagtccactagcaaaatgtcagtatttccatcgaatcagatctatattgcatgtaacataccctcgtgctcaccccactttccatcgctgggggccttgtagtgaattcgggtgaagaattcaaatttgtccaggggtacttgctctgccttaatgcccagttcgtggtccagcttgcgctgcgcagcacgcttcacacccagtacggcagcatcgagctcagctccagtctcgccgggaatgccaagggggtgtgagcagcaagtgttggtccacatatcagggaaggtgatcttctcggtggcgcgctgttggagcagaagacgcttattggagtcgaaaaggaaaactgaaaaggcacgatgaaggagacccttgtcgatgttggtcattaaatggcctatgcaaatgcaactgtcagtgtttttatcttgccatgttgtgtccactaccccgccattctgtacatctgtgggtgattataggatgcgaaacatacaaatcttcttgctggcgcttccaatcggccggtcattgttatccaaaacaatgcagacctcgtccatcaggcggacctgctcttcatcgtatccctctagttcgctgccgcgcgcagtgtttgtttggcttatcgggaggacctcacgggcgagcgatgtatcgacctcgggaaagagagtggcgacattgtccgccgtgatctcaggcgggcttgtgattgtcatggttgcgctcattttgactgaaaactaaggctgaaaagcaaagctgaaagaaagaatgagaatcccaaagaaagaattcggaggaaatgcggtcttgggtcaaaggcggcaatgatcggcaaatttgcctcggattccatccgcaaggttgttggccgggggaacttgggattgggaatctccagacaacattctaccaaggacaatctatggcttacaaaaagtgactatataaagatcagaaatttcattcaaggctagatctatctgtgtgcgaaggccaaaagcatcaattcacaccaagccatcatgggcatcaagatagccttgatcacttcagttcaaggagactagtcaacttctccaattctgcaacttcctctggccccaaaaggcccaacttctcccgccgagttggcgcattcgggtcaaacacaggcttctcagcgagcgaagtcacccgtgttccgtgtctaggctgggatccctcataatcccagcttgcgttatggatcgtgatgctattgaaaataagcttcaaatccaagacctttcagagtattgactaaccggttatcccacaatgcactcgtgcgtggactccatttaaaccgaacctggatatcagggttcttctcataaacgtcgtataggtatcccagaatcacatcactttcggccttgtcaagcccaacgattcggtctgtcatcgaccggttcacccacagtgccttccagcctgtagctggatgaacacggacaatagggtgctcgcgctccacatactgaggccctgcttccgggtccttacgatcgagatatgggtgagctgagcggtagatggcagtccttccgtcaataaacttgcggaataatggcgacagcttctcatatgcggcgtatccactcgcccagagggtgtcacccccgactgtcggcactgtgtcgttgtggagatgggtcactccggcgggctgtctctcgtgtacgagatcgctatgccagcgagacgctcctcccggccgacggaagctcgctggtctctctgttgcctgcaatgctggccacataacactaacgccggggaggccagggacttgaggaacttgcggctagaagaaacacagttggtgattcgcacatggattcgctgggttggaaaaaacatacatgaacctcaatctctccgaaccactctcctagttccttctgttgctgaggagtaatatcctggtctcggaagaagacaacacttcgttcggcaatcaataagcctagctcatccttctgctggtctgtcaaatccttcagctgcaagccgacgatttcagttccaatgtgcctagtcaagtcaatcacttccttggctgcagacagaagtgctttcttctcgggatcggctcggctgccggggtctacatggacgcgatcatagtttcgcacgttgtaaacgtcgtcaatatagaggggacgagatggccggtacgggtagccatcgctgagatcaatcccagccttttctaggcgttctcgtgcagacacaggaaggccgagagtgtccttcttgggcactacgacgtcgacgatgcgtgcatcaattggagcgggagccatgatgatagataatatttggaatagtataaatcctatgagtcctaatatcaagcctacatgcagtgctatatactctgtttagaaatgtcgacttgcttattgatcaacgttgtacaactggggtttgagcacatcatcgccatcaaccatcacgtcttttgcgggccacgcatgtcacttttagttatctccggctgccatcctcatacccctcttttaggacttgtaaattgtccaatctatactgctatgtgtacttagtcgaagcggggaagcttcgatgtcacaatccaatatcaaaatcacgagtatctctaatatctaactcgctgccgtttgttccgggaagcatggcgatatatcagcccatgttgtcgtttggagggcccataagtgcgcgaacaatccacgtagacgcggatatgcaaattatctctttgtctttcttttcgcttgataatcatgagtgagtccgttcgagttgctgttattggggctgggatcagtggagtggttactgctgggcatcttctggcagctggaattcaggtgacggtgtttgagaggaacaatgcaactggtggagtttggtaagatggtgaattgtttattttgatctggaataatggactaaagcattgtaggatttatgataagcgtactccgattgaagcccagtacccatcgccaagaccgtctgcttcacaggaatatgtgaaggatgagagggaagggaatgaaagaaaggtcttgcttcatgcgcctccggggtaggtttctgatttatgtttttttttaactatagcaggcgtactcactattgaccaggccttgttatgaaagtctcaccaataatgtctcgacacccttactacggaccaaactcaacgcatggccagaaggaactgctccttttgtgaagcataatgtgctcaaggaatacatccaagacacgtcgaagaaggccggtgttgatgatataaccaagtttggcgcccgagtgacccgcgtccataaggatggaccaaaatggacggttcactggagcactttgagcgaaggccaagatcccaccgagaaggaggagtctgcagtaagttctcatatctataaaatttttcattctcagtggttctgaccggatcatagacgtttgactcggtgattgttgcctcgggccattaccatacgcctctcgtcccgaatatacggggtctaccagaggcaaaagcccaatggccggagaggatcttccattcaaagtctttccgaaggtcggaaggattcaaaggaaaggtaggagcgactgcattctagtattgagtggcactgaactgactcaactacagaatgtacttttgctcggtggaggtgtctcttctctcgacatagccactgaaatcagtggaaccgcacatcacgtgtaccaaagcacccgaaatggtgccttcgatctccccgagagtgcacttccagaaaacgcatcaagaatcgccgaggtcgaagcattcgaaccttctacatcgacatccgcgaacaccgagcacttgcccttaaccgtacatctcaaatccggggagaccttgcacggtatagacacaattattctttgcacaggatatcaaatggcacttccattcctcgacgaatataatgattacacttcgtctgcggccgaggcaaatgataccgtgctcgtcacagatggcactcaagtccacaacttgcatcaagacatcttctacatcccagatcccacgctggcgtttgtcggcattccattctacaccgcgaccttctctctattcgagttccaagctatcgccgtgacagccttcctgtctggagttgcgcagcttccatctactgcgagtctccggacggaatatgagaatcgggttaaagagaagggacttggacggagcttccactcactcaaggataaagagcaaccgtatgtcgaggaattgatcaaatgggttaatactggaagagctgagcgtggtttgcctttgattgagggtcatactgagagctggattacagagagagcggctttgaccgagagacttaagttgattctggcaggaaagcttcctagggcggatattctcaaaagcccattggaggtgggggttactgcatgacctattagaatatagacattgaaagcattcagagaagtgatattcgtagtttcttgactgtaacgtatccccggaggctctgccaaggcaggtgcgatcctgctccttcccatgttacgccttcctctcgaggtctcttcatctctccacctatgttctttcccctttagcatgcgatatcacatatttacctcatcctgggaccatgagcccacagcttcaacggcaaggcaggaatgggcccgcgcctacctttgcgggtccttcacccggggtaagcacgtcccaacgtccctcagttctaattcaacccccaagccacatgtgacaaggtcaccgcaacggcctgcaactaggcttaccataaccgtaaggtcgcgcagtcgagttctcaggcagccacgagcacgcagaccgagcttgataagaacgacccacgtccccgacttcatatcattgttgacgccaacggagattcggctgtacgagcgcatgtcactaataaagcttagataaaatataacgtgtttcgatatgtcggttcggaaatatgagatatatggcgagatgtgcaggggcgatggcgagtttctagcttgggatgacaacatcatcaccacaaatcattccccaagttggccaagcgcccaagactggacatctcgcacggattatgttgaaaaaacttgcatgaattgcgcgaacaagtcgccccttcattcgacgtgaaaattgtccgcttgatgcggagtataaatcttgaagcatgattcactcggctttaaaaagggccccgatatggctccattctatgctgacacaagctttgacaagacgatcactgactaggtaggctggccttgtcaggttagtaagtctttgatattaatcgcctgttagacttggtagtttttctgcgctataagaacgttccgatgtctccaatccaatcttttttctcattgccacgacatcaccatgtcgctaaaataccctactgaagctgttgtcgatccggcgacacagatagttcaaaaagaacccaagcgcaaatgggtcagctacatttgggacacatttgacaagtcaccacaggagcgtcgcctgcttttcaaattggattcggccattttgacctttgcatcgttgggtaagtttcatgaaactaattatcttggaaaatgctaatagtcataggatacttcatcaagtatctggatcaaatcaatatcaacaatgcatttgtctctgggatgtatggtaccatattgacccaatctcgggagtttgatattgacaactcataggaaggaagatttgggcatgtacggcaatgaactcaactacatgcagacatgctggactatcggctacgtcattggagaaatccctagcaatatactcctaactcgcatcaaaccacgatattggattccggctatggaggtaagaggttctggttctattttcgagagctgtatacttacttctcaacagcttctttggacggttcttacaatgtcgttgtcacggtgcaacactcctactcatttctatgttcttagatttttcgttggtatgcaataacttcaagcacttactctatcatagtgggttattgacattgcaacactataggtatcgccgagagtaccttctatcccggaatgcagtatatcatcggctcctggtaccggaaagatgagttggcaaaacggtcatgcatatttcacacgagcagcggaattgccagtatgttttctggttatctgatggacgcggttttccacctcggaggacgaggaggcttcaagggctggcaatggtaagaaactggcaaagtctcggcattgggtcatatactaactaccatcaaggctttttattatcgacggggtcatttccctgcccgtggctattagtggattctttatccttcccgatgtgcctgagatctccaatccatggtatttgagtaaagaggcaagtttgctttcaaaccttcgcatttgatacaggtattgacatcaaagtaggaggtcactctcgctcaaacgcgaatgaaattagaaggaagacagaacagacagccatacacaaagtcaaagctgaagaaaatctttacgtcgtggcacatttatcttctgacattgctctacatgtgagttgaatactggaatccatctaggactaaaagactgactcaccaattttagatgtttcaacaatggtgccgctggaagccagcctatcttccaacagttcctcaaagactcaaaagatcctgtatattcagtcagccagatcaactcgctaccaaccaccaccccagccattcaagtcgtgacaaccctcgcttacgcgtggatatcggatactgtcctaaacggcaaacgttggcccccgatcatcttcggtgctgtgagtgtaacaccacataaggaaatgatagaaaaatctaacactgtcccagtgcgtcaacatcataagctacgtctcgctcgcagtgtggaacattccgttgggatggaaatggacatgctacattatcagcggagctggatatggactcagtggtctgttaatggcgtaagtcatatattccccaggctataaaagtgcaaatgtcctaacacaattaccacagctgggcccatgagatatgctctgacgataatgaagagcgatccttggttatcggaagcatgaacgaaatggcgtatgttttccaagcatggctgcctcttgtcgtttggcagcaggtcgatgcgccggaataccgcaagggctttatcacggtcaccgttctgtttgtaatcttgatcatcagtacttttgttgtgcgcttccttcacaaaagagagaaattgagaaaagggtaagtatcttgaaagtgtgttatgcttttaggctcgtgcttgctaactgatgtggtatataggaaccagactcacgaggcagaggagacggaagataacttgtcagattctgcagaaacaaccgatattgagacgaaggctatcaagtcttaggatattgatgttgttcatctatgcttcctgagatggatataccaaatggagaatagacagatagactcaaaggttaaaagtacgtataagttcccttaatcaatcaaaattctagagacatgaacggagtaacagagaccaggctttttctattgtcgacttggagagtagtccatatccaatgataatgctaaatattgatgagccaagcgttacaagttacaagcatatgttatcttatttcccaaccattttccaggctcgtctgacatctagtaagccccttatttaagattgagcacgaactccgacggagtataaaccaacaatctcggctacaagaccgtgtgatgagtcgtggtagcgtgtgatgtgatcgaatacccatgtcgatacccaagatcaaccaatcagatctccagtctccttaggatcttgatacaaagcccggtggttcaaccatacattatcgacttcggataacgcttaccgatctgactgataattggattgtccctgcatgtcgtcaatcctccatactccgtcgatgagagcattatcgcaatctagaaagatagccaggatttccgaagatccgaatctaaactcaggggtagattataggaataaatcgatagctcaagctagccacccgtgtggtgccgatttcaaagccgttgaaagtacggagtggtgttagtggcgttgcggactagtgaaggggatggacatatcctgaagtacaaattccaaaattatgatagcccttttgaaattgagagctccatcacaaaatgagacggtgggacaaggattctcttgttcctattcctggcccctagttcattgcggatacggaggaatccgtagagatcggcattgattccttttgggcaataatctcgagcttggacttttcttttttccagcttttttctctagcttggggccatagctccgatggggaatcatagggatctgcaaatcgaatgtgggaatattgagagacagcttcttattagctatgctatacctatatctccctgctcaatgtatcaacgtacttttttacctttgctccatacaatcccacccggagcaaacaggaaaatgattgccgatagggtaataagtacaaacgcctcatctcggagagcctatcgtggaagggatatatgactcctggattttccgggcccactcgcgaatctcaggggcaatggaatcggtacctgactctgctatattagacattcggatgtagtttatgatcacggaccattttctaaataggcgaacagacgcgatgtctcctgcgcggctgcaccggaggcacaattccaaatggtcaattgtggtttggactccacttagcggagatagcggggtggaagagaggattctggacaagaataatgactatttgtttaggaacgtcggattcccactctattttcccgtgcgagcaaggattaataaattgcaggaggtcagggctagaagtgagacacaacgcgatacttcacctggggatttgcgctttttttgtcggcacttgcgaaaacagagaacggagcaagagcgcttttgaaaacactaagacagttagagttgtttcacagtcttccttcaaagatcgtctgaatgtcgacgatccctcttaatcttagcgtgtgagtcggcgttcttaggtggagcgcggcaagagtcgagatcccaacgggcctcgaagagtcgaagagggggaaggggggtagtttttgagtcggaggcgatccctgggaataattccttggtgaatttctgttctcgtggaaataagtccaatttccacgcagaacaatgtccttttgggtctctcgtacgagtcgttggtccggacttgcattcatacacaatatgtatgttgtactggtcaacttcaaagacttccaagactctgatcttcagcatccctgctacagaccatgcagatcttgagctagaagtgatgagatattccttgctacccgcgcgccagctcatgcgcatgcaaatgatatcacattcgaacatgggaaatatgtacggggtaatatatcaaacagtagtatagtcaatttagtcaattgaaatgaattaaacaatgcgataagcaaaaaagaccacctgcagtacaataatccagaattccaaccaaatgcatcgtatagcaatccaacaacgccaaggaaatggggcttcatgccatgaaatatatgaatcctcataggagtctcgcattcatgaagcccagtaaaaaaaatagaaaatttgagtagctctgactagcagatcccagaatggcaaacccatgcaatccaagaaccatagccaaagacgatatatcccgatattcgtttaacatgcagacatgtgatcagctgtccgagctactagctagctgagcggcggtgattcggcactcgttggcgttgcttgggcgtgagcgaaggatcaacgtggccggtaaacttcgcagtgttgcgctgcttctccgcacaatcatgtctattgctcatattagtcccacgagtacacattcaaggataaatattctgggttcttacctggctagactatcctgacgactgaaacgccggtcgcaagagtcacagcagtacttccgaagcccgagatgaacctagagaccttgttagtgtctatgcttgattccgtctggcctccctactcacggtgttcatgtgtcgtttgagatccgagctccggccaaaagacttgtggcactcatcgcaaggatggttgtgcctccattcagggttgtgcagcttttggtgctccttgcagttggagcgtcgcgtgaattttgcgccacaaattggacattccaggccactggcagatactagcctgtcatttgacgcgcagcgctctattgtactcgggtccgtgacaccatcggagaatccttcgatagatgcttggggttgcaagacttgaccagtgttgattccagatccatcgtatccaatctcctctcccatcgccccaaggtaggacatgtcgttgacggataataggggcatcggagagggcatacacacgtccgaatacacactctggtcccattgtcctgcgccgttcggtacagtgaccacatccgatggcgttgtcggtcccgagcaaggtgtgtgcatccacatatcggtcatttggcccgcgaagacattctggccagaggcaatctccatgccagagttgtagctgggagacgcgctcatcgtcgtggggctgtagaaccccagtgaagtctctgaagcactgttgacgagtccatcgtaaactgatggatagcatgctccggcaaagtcgtcataggataatgcgaaggtgggatttggcgctccaggaatcagttgcgatggcagtgtcgacgtagggaaggccctcagttgaccgaatccattgtcgatgtcgcagcgggaaattcccagaccaataggggaaacacctccctgggacgaggtcgaaacaggagacgagtatattgaggatgcttcgcaagactgtatctcctctcttcgcggggatgtaattgaggtgcgctgaactaaattccgattcatggtgtagagagaagccgagataaaaaaaagaagaagtgtattcccatcaaataaccaaccggagggctagtctatatcagagtaaataaagggtgatcaatgcaagtatatatagtaaaggctctggagtcaacagcttcgctgttggtgattgacagtggtggcatacatcggtggctgagaggagggtggtggatagggtgtgaattcattggagaagaacttgcgccgcatcgacaccgacaaatgctgaagattcaacgacctgacaccgtaatagacaaggcagatttggagaagaaagggtctgtaattgcggtggaagagaaaatcgggtgggggcattaacggccgggggggtaagggtaatccggacgagatggcagtccaggtctggcatatgtgcactcacagagggctagctccggagagatcaagatagactatgtcatagccacctagggcaaatcaatgcatttgcagcctagtttcggccaattttagagatcgtaataccctgtaagaactactaaggtacataagagatatgacggtgcataacggcggctcttgggtttgtctgggaaaggctaaccatccatttgaccaccgttgggctggtctgcccaaccgagacgtgtcccatgcagggagtagccatacagaaacagcaccagagcccgagtctctggttcggcttggcgaggtgcattggtcgaggggcctgtcgaccaagagcacagccctgagacggtggggaatgtagtattttctgacgaagtccggaatcgggtgatggagttgatcaacaattcatgagcagaactaattatcgtgacctccgtcgtatgcgggccagcccttccgaaccgctcgatccctttggcttcatgtataccatagcgcggaaactccacattgactccaccggtaattgacgcgcccccggacaaactgtagctctctatgagatatccgaattcaacatcatggccgtgatctatttactcgcttcccccctcttgtggatcaaatatgagattgattgaaaaaggaggaccaatcttgaaacgccagggacagggggggggaagccaccccccaaaaaaaggaaaaaggaaaataggagaaaaaaaaaagcgaacgccgaaaaaaaagcaccaagcctgtttcgattaggccgtcatcgatgtggttgttcacaatatcgaacggcttttttggagttgtcaaggtggctctgccactaaaccgaacggacgccgactagcgctcagtccggcgcaggggcgtgcgtggctctaagcgctagggcagtgacccctctacgcgcctttcttttcgaacccgactccacagagccaaatcacagtgcggagccgtattctgtgcccagaaaattgtgtaatggtcacttttgctgggcaatagcctccacttgagttcgtagtcgctctatcgtgtcgatcaggtccgcaagctgcggtacttggccgacctgccccatctctagctcgcgcacggcttgttgatccacactaggtgcttttccagggcctaggcgatttgtttcaactacggaggggtggtgtgggtcccggcaccttgattcagttggttcagaagttccttgaccgcgtgctgacattgggggtagttggatagtggttcgttttaaatgtcgccatttagactcgtacgcccatatcaacgcgacaaacgggaggtgagtggctcggagcaggacaatgcgtacgcgacgaaccgttccggcagagagaaaaagccgcatggggcggatacagaggaggggaataagattctgccgagtattagcttggaaatattccagaagatacaaagaaagattcaagtttcaacgatcagacgctaactgaccaggggtggcatgaagtatgtcagtcgccgagagttgctgctttctagcacataaatggccaacctgattggcttgtcagtcaaatggaattttccatggggcagtgccaaatttcggaccagcagggatgtttgtatacttactgaaaaagatattcttctcgagcatggcgcatcacctatcacaaaaaaagaaattaatcagccacacaatatacctagtagaccgttttcccttaccccttcgaggctcatgctcatcaaactaatcaaagatgaaagaatgagggtattggtcatcaaggcgaaagtaagcctagaagtcattcctgtcagtatctgcattacattggcaactgcgtggaagttgtagattgccgtgtgctcaaagcgccccaaaaagattcggtcacttgcatatcggaacgtgatcaaaagcacatgcgacttttttcaacgtggcgcaataaaagccaaaaaaaacaagggaacctacatcaagccatagccgaagatgggggagatctaaaaaaaatgttagcgtgcatttcaacttaacacgacagccaaccatttcgccaatattccggaataatgcggtttgagctgcagaacagccgcctggtgcgcagacttacttcagacgcggtgtcctgtcatccaataaattcagccactgtcagtgcacatcctaaagagggaaaggaacgtgggaacccactaatccaagaacactcgatctgcctcaagtggtcagccaaaaattaaaagagcggtcacgacaggggttccttcaccgtacccaaagaacactttcactaacaaatgtgacattgtactgagagacaagcggtcacgggcaagcattgtgaatgtggtcaagaaacctgtaggggattcagcattttattcggctccgacatgcttcactttgtagggcggaatgctttgccacacttaccaatatacagtactaccaccacggggaaaaacctgaagaatgcttttgtctgaaacagattgtcaatcagccttgggtcgcaaagcctgagcgaggggttgggggaaaatcgcaccatctctttcaacaccggtatctattcatatcagtcaatcctgttctaaaatagtgatgcttcatgcaggatccacttactagactgccgaagtatgaattcaagctcacaagcgaacagatcctgctcattccgtgtcagccctgtcgcacaaatgcatagtccatgagtagccatgccttggtacaagaaacagagcctccaaggaaagaatgtcgaatgagagctcaatgatgtcgttgtcgcccttggttagcccgataacccctgtggcgttctcatcagtcgcaccatcaacacagatgacctgccaacgagccgtaaggcagattgggcactcgatgactcacttgttacgacaaatgcgatcccaacaccaattatgctcacgttccagaggctccagaagtccatttggtagaaaatgactccggcatcaatgatcccactcaattcgtcatacgcaaaagcgacgatccacacatacatcactgcctcgaagacgccaacggcatcttgtctcctctctatcagtactgcgtagtagagaaagaggaaagacatgaagaatgctgcttcaaagattttccgatacagagggactctcaggcgtgaatacggatcagccgttctgatgaaagaatagtcagtatctccgcgagactatcccgtgtcgcgtctaaccttgcgttgaaaatatgaggtttcttggttgaattgaccgtcagagaaccccagaaaacgatttcacccttccaaataccatcgaccactttttgaacaactttttggctcagaaatgtctttgcattcgcaattgtcgcaatctcaagtgcattcaatccaaaaaaccgggaatatctctgggcggcataggtttcctcttggtatgtatcttgtgaagctccagataaccgagtctctgtgaccctcctgctgctaaaaaggcgataaaaagaagaggactttggcaagagaggagtggtctcactttcctcttgtctaccttggatagatgccagggcagggctacctgcttcggaaccaagggtatttgtcgaaccgcgccgcggtattggtagctcttccagcagaaactcaattgtctcgcgctggttcaggtgacacaggaattgccaggcaacaaattcgcaggctgcaccacggctctcattaagtccccagtcatcctcggtggcggtggtgaagtcccatttcaaaatcctggatctgttaatcaaccaatccagttctagcgtcgtctttgtgctgaacttacatcaatgccacaatgatataagggttgtgagtatcatctgccaaagcatggaccagttgtctaagacggtgtccttgggctccgtacagcatttgctcaaacgtgtaggccatatcacccacggccatgctgatgaagctacagggggcttggttaatccagctcgatcaagatcacagacaaggcttacttgaacagtttaggaagaacatcgaatagcggctcatcaatttcgatcaccggaatttccgtatgatccatggttttatccatctggagattgactccagggtttcctttcaataaaattggctgtttgcttttgttctccttttttttggacctagtgtatctccccttagggataaggcagaactgcaggtatcaagaccgaggtattgatggaagatccatgttttttgatcagcggggggttcaattgaccacaaataacaccgtagcaatgagctctgtcagtttaagataaataatcggcaattttaatatgaaacacaaaaattgttagaggaaaagctgacgagttgcaagttgccaacaacatcttgctgaccgccttgtgcacgtgtcgacacgtccagtgacttcatcggcttcagttcgactttccttatcgcatagttctccccaatcatctccatcggatttaatcattctctgactctgaataattgccatcaaatctccaacgggagatgatgggcagtcgacaccatgggacaaggctactccctcacaaccctgtccgcgggttcggcggggatcgatgtgcctgaattatctgacatggtgtatgagaagtcgatgggaggtggcaggtttatgaaaagcattcgcgcaaggcaaccaaatggtctggtgttcatcaagattatcatgaaaccgttcccaaccatggaactggagccatatatcaaaaacattgcaagtatgtttagatccctttttactatttcaagcttctaatgtccatctcaggagaacgaaagttattggcggatgtgccaaatgcgctgagctatcagaggattgttgagactgccacgagtggataccttgtgcgccagtacattcacagctctctctacgatcgaatgaggtaggtctgttgagggtgttactagcgaaagacgcctaacattgatatatagcacacgcccttttctagagcatattgagaaaaagtggattgcctttcagctattgtgtgctcttcgagattgccattcactggatgtctaccatggtgatatcaagactgaaaatgttttagtcacatcttggaactggctatatctttctgatttctcgtcgtctttcaaacccacattcctcccggaggataatccagcagatttctctttcttcttcgacatctccgggaggcgaacctgttacttagcccccgagaggttctctgttgccggggaagagcccagtgaaagcggcgtgaactgggcaatggatattttcagtgctggctgtgtcattgcggagctttttcttgaatcgccgatcttcaacttgagtcaaatgtacaagtatcgcaaaggggaatacagcccagaacacagtcaactagcaaaaatcgatgatccggacattcgagagttgatactgcatatgatccagcttgagccagagtctcggtactcggcggatgaatatctgaatttctggaagggcaaggctttcccggaatacttctacagttttctccaccaatacatgtccctcatgaccgatccttcttcagggcggacagatgtggatgcagaatcagccaaccgaagggaggcagacgagcgcattgagcgaatttacctagacttcgataaagtatcttacttcctcggttctaacacccgtggtgttggtgctttatctagtgtcccagtcactaaattgacaggcaacacccttcctgtgaggcttgatccgccaaagggtgaaagccaactttccgcaccgcagtcacagcccgacgagggtgctctgattttcctaacacttgtggtatccaacttgcgaaatacagcgaaggcatcggctcggatcaaggcctgcgatattcttcttgcatttgcagaaaggctgtccgatgaagctaaattggatcgcattcttccatatatcatggtattactaagtgatcgaaccgatactgtcaaggtcgctgcgatccgcaccttgacccaattactgaaaatggtccaggtggtttctccagtaaatgcctatctgttctccgaatacatatttccacggctccagccgttcgttgctacctccaacagcaagtcaagtgccatggtgcgtgcggcatatgcctcatgcattgcgtctttggcccagtcatccttgaggtttttggacatgatccaagcattgcgttcagatactcgtttggctgcgttgattccggtcggctttgagccccgatggactgaagatgcgacttatcacaatctctatgacgtggcgcgggtcgatcttctagaatacttcgaggttcacacaaaaatgctgttgacagacacggatgcatcagttcggcgagcgtttttggggtctgtttctagcctttgtgtttttttcggcaatctcagagcaaatgaggttgttcttagccatttgaatacctacctgaacgatccagactggatcttgaaatgcgcctttttcgaggcagtcatcggtgtggctgcctacgtggggagcctgaatttggagctatacatattgccgctgatggttcagtccatgaccgagcccgaggagtttgttgttgaaagggtaattcgatctctggcagccatggctgacttgggcttattccagcgatcaacaacatgggatctcctacacaccactgttggatttttggggcatccgaacgtctggattcgggaggcagcagtcaagcttgtggttaattccgccaaatttttatcaatagcggatattcattccatcctgacacccattatccggcctttcctcaagatcaaaatcgttgtgatttcggatacccaaatgctcgatgcactcaaacggccaatgtccagaagtgtgtacgaaacggccttgctctgggcttccaaatcagaaagaggtgttttctggaagtctccaagtcgcgatggcatgttcagcttgtctgagcctggatcattcagtccccgggtgggtcaacggaatccttcctttaacatggccgcccaatcaagaaatgacgaggacgagcaatggcttagtcggttgcgaaacgttgggatgggccctgaggatgaattcaagcttctcgcactcaaagactacatttggagggtctcattgcggcaatcgagagaaagtgatgtccattcaaccccacactcgaacgacattgtcagcttgacacaaaatggagtcaagccccagactgtgttctttgataaggaaattaaagatcagccgcgaccaagccactcagacgcgaacgacggcacctccgaggaaccaaggccgagaacaattgcggatgctttacttgacgcttctacaaccattgagcgaatgcccattgctcaacgcaggcacttgcggtcgaaaagccaactttcgaaggagacaagacgttcctcgcttgttcctatcttggacggaaatgatacttccccattatcatcgtctccagtgatatcatcgcctggcggaggacttgcgtctcgtccattgtcccctccgaacattgataatgatcacatggtttccagtcgccgaccgagccctgggcaagacggctcgttgacaccaaccaacctagacactagaagtctatccgatcgtgtacataaaaagcctagcgcgatgagtttgttgagtcggaactctgccaaagcctacgcagaaaccggtacaagctccgcaaacgcctttggaaaggtagatgcaccgattcacagaggaggcacaccccaaccattgacaccattgcttccacccgagcaaaaactgacgcagaaatatcgtgcacaccattcgtatgggggcaacgaccctgcggtcctgcggctgctagacaacgtctttgaggaaaactacccgacggatctatttgatctagggccatatgtgaaagaacttgacacccggcaaccgattcacggcgccactgatcaagagccaagtaagatctggaaacctgaagggaatctagtcgcgacctttggcgagcacagtgcgccaatcaatcgtgttgtggtagcaccagatcactccttcttcgttactgcgtctgacgatagcacggtgaagatttgggacacaactcgtcttgaaagaaacttgactcctcgatcgcgtcaaactcaccgtcatgcaacaggctcgcgcgtgaaggctttgacctttgttgagaatacctacacctttatcagtgcggctaccgacggcagcgttcatgccgttcgagtcgactatcaaaaagtcagtaagacagccgtccgatatggcaagcttcaaatcgttcgcgaatatcagctgcccatagccgaagacgggtcccttgaatacgcggtctgggtggagcacttccgtgacgaagggcagtcgaccttgattattgcgacgaacacttgtcgcattattgcgttggacatgaaaaccatgctcccgatctacacactagaaaatccagttcaccacggcacactgactacattctgttgcgaccgcagacatcactggcttctggtcggcacaacccatgggattctcgatctgtgggatctccgctttcgtgtgcgactgaaggcatggggtcttccaggctggggtgctatcaaccggatccaactacaccccgtcaaggctcgcggacgctgggtctgcgtatccagcagcggcagccacggcaatgaaatcacagtgtgggatatcgagaagttccgctgtcgcgaggtttaccaagccaccccactgggcgtcggcaataatggccccaatggcgctcatcatcctccccgcgccgctcatgtctacccgacggctgtcgtgccgagcgattacgaagcgtggcgggtggatggcgaccggccagaagggatgctgagtcgctttgcaagcactgaaccaggtaccccatcctcgaataatatagccggcgatcgacttggcatcttggcgtttgcggtcggcctcaatgcccctgtcgacgacaaggacaccaacacgaaatgtggatacatcatctccgcaggatgcgaccggaagatccgattctgggatctagctcgaccggatctgtcctccataatcagtgggctagacgctgtctcagatggtaatgccagtggcaagccatactatgagcagtcccagcccggccctagtctcctggttaccaccgagcaccttcccacttcgccgagcactggcagttctcgagatgctaggaagggagccagtccgaggccgccacgcagtaccgttatcagcctgcagcagcaaatgttgctgaagagccatctggatattattcaagatgtgacggtcttgcgtgtgccgtatggtatggttgtgagcgttgaccgggctggtatggtgtatatattttcttagaccttatgttatatgcttccgatgtacgatatggaattgaacagtatctggaattagactccatatatggcatatgctcaattgtattttaggcatgattccgtacatccggcgtctttttatagacatctttcgcgaaagacataggaaatagatagcgaaatatatattaatggctgctactccgcacttcgacccctatcacggataataacgaaatagttaagcccgtgaaggtagctggcccacaggatctatattgtgtaatatcctcatcaagatgtagaacttccatttatgtcccaagctccattttcaagattaagccctcttgccaccggatacctggtacctgggcagggcgtaccggatacttcggcccacgcgggttgcagctgcatgaactaaggtaccgggtacgatgcctattggtactcaaattttgctggggagagctgtgctgtgggtcgttgcgaaacatgaaaacgctggtggagtgggttgtggatcgacaggcaggagaccctaataaggcttagagtaaggagagaggggattctggaaaggctgcggatgggattccaggagatttattattgcacggtgtgaaaggactagggaataagcgctattaattaagcttgcatgagggcggtttatcaattggttctgtttataaattttcaatgtgcgcagtaaactgtagtactacagagtagagagacacgccatcggctaacaaactacaattagaatgctgataaatacaggcataataacctcggacgaataagccgggcgagataaaataggactgcaaatttaccagaagcttggaacaaagagcttgctctataatctcggacaaaagcactccccgagtttatgactatttatacactgggtaatgtaaaacatactatagagtactcctactcgatacagaataagggtgttcgccagtgaccctcatccaatggtccatgcggtcttcccatatgcgatctcgagttctcgccagatcgctaccgttaccacgtacatacatgtacggactactgctccgtacggggccgttccttaccacatggatccagaaccctgcaaacttcaaagtcgtgcgtgaggggctcatccgggaaatgagatctccgctggaactgccagactaagcagctcggtaggcttagtagcttagctttcccgctttcacgggttagcacgagtcagtagagttttggtgaggggaaacgagaaaatgggaaagggagatgtgatgggagatgtacctggatatctggatatatattgtaggttgtgtctgtttcttgtttcctcaagggccaatgttagataatcaacattagaatcattcagggggtgttcccaaccaaggaagatcgaggagatggagacgggagtggagatgggccaggggaactggccaatcatggagattgttcacagctcagacgggtagcttgtcgggatatccatggctcacgatcttgaattcggcctctgatgaaatcggatgaacgcagatgatcgacagaggagggattgaaggaagtggtgaagtggttggagtctcctagctgctcgcaggaactttgcatatatatggttgcactgcatgcgtagataatgcttcacctactcttttcgatgtcctgataggagtgagcatcaatggttccagagggtggacttgggtaggtgttcacctccgaacggccagaatctcatggcccaagataacagtgagattccagtcagaactcttatacggtgggaaggataggtgcatatacttgataactccgagtatcaaagtttgaggtgaaacgaatagatcacaaagataaaacccaacgttaccaacggtgttggatgtatcatttccatctctttgatctaataatatgattatctcgctgacgaaaagaaacgaaaaagaaaagatgaaacacagaaatacacaccctgtaatccaaataccgtacggaattaaagtggagagaaccactttcgtcctagtctataactccctcgattcttcttctcctatttgtccctccccctaaaccctcttctttcttgggttctgtctttcaactgcataagttgtatccatatggcgggtgtgttctcgagtcttgagtattattgaagtttcacccgggcttctcacactctctaaaacatctccccaactttccttggtcttgggtaaaccctcatttcgaactgcactccagcagtgcttcccccccaattcatacagtcctatatctcaaggaatcccaaccccggactctacaactcgacatactcttcgactcgacatactcacccgatacataaatctaccacaatggttcattctctgcgagatcatggatctttggtccggccatccactcgggatcggcccgttacacgcggcgaaggggaaaattcgctggtcgttcctagccgcacatcatcgttgcactcgcgcatcacccaacctatcccgtcctcacttagtatcaagcccgcccagcggacaccgaaaacactcacccatgcgtacatggtatgtggtgtcgggcgcgaaccctcacaatgggtcaaagcgcctgtccccgaccagggcaagattggccacatgaagggagccgtcggtcaattctggctgccggagattctgggaagcagccctcggttagagcaggacaatgagatcgcacgagccctacacgcggccatgcgagcatgcttccctcacgacgtggagatctgcaccggcaagagccagcctcactgtgcacaccacgccttcgtattgcaacaagactcttctcacactctgtacggtattgcgctgcgcgtttggtcccgtgccgacgagaaacgcgcggagactatccgcgagctacgcaagaagacggagccggacttctatgataaccccgatgagacctactggattccttactgcttgagcttcctctcccggtatcccctctacgatctgctaggtgactatctccgtggcatgtggatccactggaacaaggccaccaatctgttccacgccgaggaggtctcccgcatcctcagcttccccgcgccacgtctcaatgatttggtccgcattgatatgaaggactatgccctctgctatcagttcccctcgtcgcccaccggcttccaaaactttgccatgtggccattgttcacttgtctgtcgatccctaacattgtcggcgtgattgaggctgcggtctcgcctacccgccgcatcatctttgtcagccactacgcggccatgctgacggtcgctgcggaaaccattcgctactgcgttcgcgtctatgagtggagtggtctgtacgtgcccgtggttcacgcccgccatgtcaaggagctggtccaggagcccggtccctacattttgggtatcactgccgagtgccggactctatttaacgccccgtctgatgccctcgtggtcgacctcgatcgcaactttgtcctcacctccagcccgcctagtgtgctgaaccagggccaacgcaccaagtttatcaaccgcatgacccaatccctgaatggtgatgtctcgccttccggtgtgccccctcacctgcgcactgcctacgctggcggcaagctcattccggctggccagatcatcgtcatgagaggagaggtcgaaagcattgaagaccctcaatggtggaaccaggatgctgtcatgggcgttatggaccatgtatgcgagaagctggtacgttcaatcatctctcaattgtcactaaccacaatcaaactaacagctatttattagggccgcaacaccggcatgaaggctatctttggtggctccgtcaagaagcccctcatgaccaaggtttccatgcgtcacctcaacgagattgtccgtgagcgcaaccagtactctcgggatgccatggaagcttggcaagacttcatcaacctcaagggcagaatggacaccgaactcagcaaggtcactaagcgcaacaacttcttggtcgaggagctcgagacctggaagcagcagttcctcaagttccaggcctttgctgagcagctcaccaaggagacctctgagctcaaggtcaagatcgaaacccacaagcgcgagagccgtcgcctcactgctcttattgatcaacagagggacgatgtggttcgccttactctgcgcttgtccggtactgagaagcagcgggacgatgctctagaggcactggtccttcagcaggagattgccgaagagctcgagcgcgagcgcaagcgcaaccagaaggaaatctctgccctctcgcacgccaattcgactctcacccgcgaacgcgaagatgcccagcgcgttgtcatccacctgcgcagccttatcaatggtcagagccaccacatggagcacatcgtccgctccattagtagcaggtcggagatcgctgaaatagtcgaattaggctacgaggacgcccccgaggagatcaaggataatgtgtcagtcgctgagtcgaagcattccgtcaagtcgactaaggaggtcaatggtcgcagtactccggtaaatgatatgaagcccgagctagagcagcatttgctgaacatcggcaaggaacacaagagccttgcacgtctcagcatcacagatgttgcagaccgctacctgcgcgataagaccgatgccatcgcagatatcatccgcagcatcagcgaccagtgtgccgctgccgtcgaaggcctgcacctggcccaggacgccgaggacgagcaagaagccgagacctcttccaatctccaccagaacgaccgtcgtggctccgaatatgacaacatggagagccggtccatccgcgcccctagcgagatcagcgataccgacaacagctatctccacccggacaaccgccactccagcatccccccgaccccggatctggtccacaaccgctccagcacgtctatgtccatgatcagcaactcgactttccccgagcggtcaagcgggcagtatggccccagcgatttcccgacccggatcgttgaggatgatgatgagcacgctcacgagactgagaacgttgacgaccagctgactgagcgcggcactctgtccaagcagaatagcgaggatctcatgcggcccactgccacacgggtgatttaaattttcgaccagcttttcaggttagatgactgagacgatcttgttttgtttttcccttctcttctctgtcaattccttgttgtccttctgtctggcgaggccttccacccggtttcttttacttcatctctgctgtatcctgaatacgcacatacgctttggttgtctggcgtatatcccatttctcgtcgtgtcgatttcttcattatatccactcgatcatctatgtgtttttcttgtccaataatttatggtcatttttgccttcctgggacttcttattttttttcctctctttgttttttttttttctttttaccccgttcttcccgaggattgtttattcaccatatgtcgtgccgtctgggatggaacggcttgatttgtttgatttgccctcatctccagagagccctccactttgcaccaccatccgcattgcctgcggatgatatttccttttcatctacaatccttgatctggattgatccgatctaccagggtctatatagctccctgtcctccaaaatggattctgtgaatttaacttttcgaaattgcctcattttacatccattgtagccaagccactccaagaaggcttatagaaccacccgtaggattcatatgttaatcatgaaactatatacatcactcaaatgcagacccaatgccaaaacccatttcaagccaacttccctggcacaaaaggatgaccagcactcaacccgccacagaccgcccaagcctgcccattaacataactactctcatcactaccaaggaacagcgccacacgcgcaacctcatcagcaacagcaccccgctgcaacgggttcaactgcccgaccttgcgctccgtgccgcgctcccgcgcccggtcaaacactgtctgcgtcatcccagtctcaatcagcccgggacagatcgcatttatgcgaataccggttccagagagctgatacgagaccgtctgcgcgatcgacacgacagcagctttcgaagcggagtagtcagttgaaccggcgtttgagcgcagacctgctacagacgctgtgccgatgatcgagccgcctgggtacggcttcgaggctgatgttatcttcattgccggggcggcgtgtttggctgctaggaagacactgtttgtcgcggttagattagattcgtattcgtttgcgtcggggagaatcccgtttgctacccttgtgtatcagggaagagaagagaaggatgtgtatgtaaatgtacgtacccgagggcgtttactcgcatcgtgtttaggaatcccgcactgtcgatctcggtgaacagcttcggttggcctattacgccggcattcgcgaagaagatgtctagtcggccgtatttgctgactgcttcgtcgatgactgctttcacggctttttcgtctgctgcgtcgaaggtccgcacgtgcacttctacttttgggtacagggtctccatctcccgcttgtgcgttgctaggtgcgtgtcgctgaagtcgcagatgtagactgctttggcgccgttgttggcgaattggtgggcgctggcgcggccgatgccattgggagagtttgcgcctggtttttattggtatgcttcttgaatggccttgggaatcaatgtgtgttacttaccggtcacgattactaccttgtccttgacgcgactgtagatttgattagctatgtttgatcttgtaatacatacaatgcgagaagccgactgaggaataatagagctataagctttaaggatacttacggtcctgctgaatcagaggcaacatgacggatcttgggaatatcctcaaacgtgccctcgaagggaatgccttcaacgagctgcttgctcagggcttgaagacgttgctttgctgtatcagacatatttattgaacttggggaatcttagaaggctgataataagaaaaatgacttgaacgtgctacaaggtccgcttcaattgcggtaccctcgtagttataacagcttagcagctttccccactatgtcggttatgcggagagccgaggctccagcagtacagcagtgcatagcgaccaatatggtaacacgatcacgtgtaaatggatataagcattgaatcacatgacactcgtcaggtcacgtcatgtgccgtagggtatcaaagctgtctttgtgggtttccaaacaacgcaaatttgtgctctttgtttcctcatgcttttgttgttctaaaatagggtatctagggttgaaatgcatacctgcccctgaacatccggtcgatctcccttcattccatccgcggatcactacagcaaggatcgccaagcacgcacggcaagaccagccaagtatcaaaagctacataagctacttgattatttgtcttgttagcccgggcaccgtttgcaattcaatgcaattcacccatctccgaaagctctaagagaagccttcatgaagccattaatccacgattttaccgttcacgccattgcccggttgttgagtcatggcggattccgacacccactcccagcggcgttcatcgtcccaagcgtcaagcgcctcgagcagaagtagaaatgctaagatagctcgtgctaaaatgcaaaagcgccactcgggctcctcccacacaacgaccgacttgacctcgttcccctcgctctcgccaccagacaaatctccaatcctcgcccgcggcctttcgaatacgttgttctccgacgaaaacagagcggaatcaaatggaggcgtgactaaccgtgggcggaaggctacgctagaaaatctgacgaccgggctcaaatcaggccgatctgccctcttcgccgattctgtctcgacacacgatatcccaggcgcgctgcatttggctgatgatgcgcacattgagcggctggttgccggaacaggcgccgtgaagatggtgaggcagttcgctcgcgatctggctcaacgggatgctgagatctcggccctccgccaacgcgccgatgcgagggagcgagagttgaagagaatgctccgagatgtgtctgtgtccaaccaagatattgaacgccgtctctatcagttggagaatccgccgggtgatcgtgtctcagacgcagaaagtactcatagcagtgatcatgctggtcaagcctattccagcttgaatggactgatgtctcaagctatggaagacaccgttggctctcggcctcatggtgactccgcagaagcccaggccacgattcgcgcccagcgatcagacaatgatcgaggtagcggagtcactgacagcggcaagcgtcaaagctcgattcggggctggcaggagtacctttttggctcgaccaatacgagccggaaaaccagtcgcgccagtagcgttatgagtgatgtcggtgaagttggagaagaagagactgagcgtcttcgggtgcccagcaatcctgcaatgcgacgcaaagcgcttgatgagcagctatttcaacccccagatggcccggcacgaaacggaccggcgaagcgaattgctagcacgtctgtaaatggcgacgatgtaagcattcattcgcgcaaatcttcacgttctctcggctcttggactgttaagttatttgctggcaatacccagtcgagcaaagatgcaagtgatactgagtctatccacaataaacctcaactcagaaggcctgacggagacaaaagtacttcgtctacattttctgccaattctaagggctcaatgtcggcagtggccgcactgaagaggattaacagcaatgtcagtatcgctaatactggacgatctgccagtgggtcgagcgtccagggcaaaatgaacactcctgccttgcgacgcaatgcagctggcagcgtgtctcagggtgcgacgtcggagactacggatagagcctccacaaatcttggacccgtcgagatggacgccattctgcccatggagtcgaagcctccgacgctgacgcctatttacaacaattcccaatcgggtgagtttctcaccgaccggttcggtttcatctatgatcaacataggaagaagcgccagagagaagcgaatactatcaagagcggtaatcgcagtttgagtataaccgagactctcggtcatcttcgaactgatgcgtcagatcatgaggatgatcctgagatcaccaaacttcggcaggacgcttccgagacctcacgttctctacctgattcaccagatgaccctgaaagtggaggtattgccatccgtcgctggcaggactatctgaagatgccctcccgtcccacagagctattgtccgacacgccctgcgcaggcccgattgtctccttgaccactgcaggagagagtcgctctcatagctcatctgtttcctacgacaaagacggggcgttggccgtcgggtctagcgcacagccatcggcgtctacatcggctatcacggccgacagccccgaattcgctggcttgtcatcggatcagctcaaagacacagccgccagatttactgtcgcagagatggaacctgtaaaactgttgttggaacagttgactgatctccacgatacgctgcaacgtgatcgaaccgtgagatggaacgagttccttcgcaaagtgcgcgctgaacgccgaaaagagggcgaagcggcagccgctgccgccacttccgatcgatctcttgctgccgttgacacgccagaagtctcgctcgccgatggcgaagttgtaggcatcgcaaatctgggtaacaaaggcaaggttggccgagcgaagtggcgagaattccggctgctcgtactcggcggcatcccagttgctcttcgcgccaaaatttggtcggagtgcagcggggcttcggcaatgcgaattcctggctactatgatgaccttgtgcatggcgttggcggttcggaccccgacccctccgtcgtcgcacaaatcgacatggatatacgccgcactcttaccgataatgtcttcttccgcaaagggcctggtgtcggcaagttgaaagaggttctgcttgcatactcgcgccgtaacccagaagtaggctactgtcagggcatgaacctaatcgcagggtctttgctgctcatcatgccgactgccgaggacgcgttttggattctgacctcgatgattgagatcattttgccccaccactactacgaccatggcttgcttgcctcccgtgccgatcaggtagtcttgcgtcagtatatctcagaactacttcccagactctccgcccacttggaggaactgggcattgaactagaggcactcaccttccaatggttcctatctgtcttcacagactgtctctccgcggaggcactgtatcgcgtatgggacgtggttctgtgtctcaatgtgaccagcacaataaatggctccgggccaaatgcctctggtactaaggagagcaacgacaagagtgccaagaacgccgaaaatggtgcctctggcagcggaggtggaagcacattccttttccaagttgctcttgcactgctcaagctcaacgagccacagttgttaacaacctgctcgacgccggcggcactctacacatacatcaaccaccaaatgacaaaccacgcgatcagtatcgacggcctgattcaagccagcgaagcactgcgcaatgtcgtccgccgcgaagatgtcgttgcacgtcgtgctgttgccctgcaagaaatgcgcgaattaagcagcggcgcaagcacctagacacttgcctgatggaatttctcgtcatggcctttcattcatttccccctgcattttcgcgtaacgccgataccacctgagcataaggcaaggagttttggcttttctgtccttttttttttctcattacctggcgctattcccctcattattcctcggttttgtgaaagcacttgttgacatagcccgcgatgttcttgttgcctgtctcatataccatcaacccagcatttgagatacccctggattttacacttgggcggcagcacttttagacctgtttgaatgaaatcgaagtctttttcaatcggcattattcttgtgcattatgaatctttctgcaactctgaagtgtctaacgtggcttactctagggctgtcgatttatcttacaagttccgatcctaagcagaatcgaaatcatacaagggacaagcttattgcttcgtatcaaacgacaaatgctaatttacttgctatgttttgaatcattttttccattttcgctaagaaactaacctccatgcgaaaacagccgatactgcagttaaacgacaaacccaagcaccacgaagggaagcattgaccaaatctttccaactaatccaaccgaaaatcatcaaggttctgctcaaatggccactcagtcagcccgtctcaggtctgggcttcctcgtagtcccctcgaagtcagtcaatgccggttcatcggccctctccatataccgaaggacctccaactggtgaagcttgtattcaaatgtctgtgcatcggatacacttctgcagagctctccgtcggtgctgatcggagctgtgattggatacggtgctgttgtcatgaacctggccttcaactgcggcttgaaggtctctctggctacttttattctccgaccgtcttccgcgccgctgtaggcgtcgtatttgatgttggcttggtccatgagacctatgtactgatatcagtattgactatctagcgtttcagaaatctgacaaacgtacgctccatatgcttgatgtaaaggcacattctctgatatgtccgttgcagctcgcgcttcttggtggctgctctgacatcaatgtccagcatccaggtaatcattgcgcaagatagtcctatcaatatctgtcagcttattgtctttgagtgaacccaggtttcatgttaacctaccgtctttgctgtagccatattgttgttcaccctgatatggcgctggaaccttttccatgcgattcacgaaatccggaggcatattttcagcggccatttcaggcgaaaacactgaaagggttggaagatatggaacgaatgttgaagaagggagaattcgttccttttttctatcttgcttcactttctcttctgcggagagtcggagacggccttctctttgttcttccccggtctatctcaaccagtcagtctgacaggaataattttctttgtcgtcacatatttccaaggctctagaaagttaaatagctgggtgttgcggtgaaagccgaaattgggggaataaaacatcttgtagccacattctttgttctcgaaatagatcttgtatacttcaacatgtacgctttgttcaaaatcaaagcctgcttcctctgaaagataggctagaccagataattcaaggagtcaatgtctccatctggattctgttgtcgcactagcgtctatataacaccctttctctcaagtccatcccctttgataacacacatctctctctcgtgtctttgatctatcatctcggcaaaatgaattacgagcgcatgtcagccgaaatccctactctctaccggctatccagggagtccagaggtacatagtcatatctccctatttatttcccttgaaccctccagcccacgagaactaacaactaacaaatcatcagaagccgaccttctcaacggtcttctgggctggatccgcaacgaggcctttggaaaaatagcagaagcctgtgctctctggggtgcaatcgtccaagccaataagcaccttgccaaagtcgatcgtgagacatgtcatgcgctctaccttgttgatcgtcgttgctgattaggttactaatctaggtacgctgcacgctcgtaatattgaacatgagcactttaatctcaaagaagttctgaattccgagttgaagcaggctaaggaaatgatggatgccattccgggtggtagacgtgcaactacggtcactaccgaggaagatttctcgcttgctattaagcggttgaagtttctccgtgaatacaagtagtctgcttggtttctggactcgaaggaggatgtaatttctggcattgatatctcctatgtactctatatttcaatgaataaggctgttgttcaataatataaggtcaggtaccggtggaaacccatttccctcccggtaccagtcaagaagcgggcaggaatcggatacagatttataccattatgttgtatactccgaacttgggtctatagccctaaggagggccagaggagggccagagtcctgcaaggggttggtggaggcggtgaacacaccagccctttgatgaaaggtcaaaggctggtgagcacgctgggcccgggcacgcttttgacttggttcaacaagtgtcgaagtcgcgaatatcagggacggtgtgaaaggtcgaatcggaaagaacagaggtagtcatatcttctttcctcagctcgggctctgatccacccagaactgactgttatctaacaccgtggtcagatccagcgagtccatcgtcggacgcagtcccaaatccatgacatcccgtgcaacggctttgatctgccgcatgatcgactgggaaatggcccaggtgcgagccaatgacttgaagacaccgatcgtcaacgccaggcggtcgcggctggggtctggcatttgaccggctttgacagagcaggtggccagttggacaatggagctcagagtaagcgcacaaataaagaatggggtgtgcttgacaacgggcagacggaaggccgcaaggcgggacaactctcgggcggccttcgcggccttcatggcgtgctcgttgtgcgagaacgcagggacattgaccgggccatggtggccacagattacttccgcggcaacggcgggagatgaaagaagatcagagcgcgggaagttgaggtagatggctgcgccgtttaacatcatggttgcctggaacatgatctcatccacgcttccatcgggtcgcaagagctctagcttggactctggcaagtgatggctccaactaccaatacgggcatcaagggcttctacatggtcctgctggccttcggtcatatcctgcatcgccaccacgcgaccgagaatccgtatggcttcaatacgataacagtatgaagagaagtcacgttcttcttccgcgaacacgcgcgcgtcaaactgtgcaatagtcggagacggtggcggtggtagggcgtcatggtagatccgctcctcgcatggaagtgggacctcgagcggtacttggttggtccggtactcgcgctgcacgccaagggcagtcatgagaccctcgattacgaagagctcccaccaggtgcgccgcagagactcggcgcggattggatccccattgcttacaacgatggcaaacgtcgcttgatgcatgccaatctcaaaggctgtatctactgcggcggctagacaaacgccggcctcggcgcgctcattatctgagtgaagcacaatcgccagcagaagcagcgcctgcaccttttccaccgacgcattttgttcttgaaccattgcgacaaccatatgccggtacgtgtcactcgaggcggccggggtgaagtgtgcaccaatgaacttcatcacctgctccaggtatacggggaacatggagcgatataggagccggtggggcggcaggattggatgagcggcgtggaaataattatagtagatatcgagcaggtagccatccccgccgacagcagaggaagaatccggtgtcagcggtccgctggttgggcgaacggatggaaccattggcgtcgagaaaccgtgcagtccaggactagtcgattcggaggagggtaacgataaggtcggcgcataagtgaagccagcctgcgaggcccaatctacggggccatcgagcatgcctaccgggttgggatccatgcgcaaataatccggcgagttagcgcggcgctttttcgacgggcccttatagcctctccgagactttgtatattcgcaatgggatcgggccagttcacatcgactgcagatgggagtcctgccatcgcatttgaggtgtttgtgacgacattgaagacaggccaataatgcgggacccggtttggacccagtaggggcctgcaattcggtcatcgtgaattaacgacgcatataggaaatgtctcaagcgaagtagaattgactggcaccgatggaatagaggggaagagaagagggggagattgaagaagttcgaatgttctcatgttcccggggagtggtaatttcgccatacgctagggggcaggccattctctctttcctaggaagagcttgtgtatattcctagagaggttctacaaggatattccctacagaggtagagaagtacctattgtaataaaaggacaaaagtactaaaaaatataagcgttttactatggaggaaatacattacaccgtaatgcgtatacctccttacattaccatagctctctttcacctacctccgaccttgtcaactacatactcccatctccctctacttgattctcctctcttcgtgtcttcttctcttccgttcaatcctttcaattcatcgaagagagaaaatcccaattcctgcttttgcgaccaccgcaatcacgcacactgtgtagcgtcacttgaactactagccgacgtggcttctccgattatatcgcccacctcttaacgctttgtcgcccgactctcgttctgtctgttgattccatctgcgtcctctgtaacctcctttcacaatgatctccgacaacgacctctaccgcctcgccatcttccttggctcctgcgccatgatgatgattgtcctataccacttcctcgatgtcaattccagtgaggaggaaccagagtctgccgaatcagcaagccagattaaggctaaggatactgtgccagtggtgtccacggacagggtgtcggcttcagagaaggggaattgaatccgatttacgactcgggagagaaccaagataccagtgcctacatcttttgattttacttttaccagcgggtcaggcacaagccaattgtacacgacagtccaatcaattggagagaaaggcagtctttgcaaatctcatggctttattcattacttccattcgagtaatttggaaatgcgtgggtccctatggaattcaccgtctagatttagataaaagcagaacctcttttaaggtgtcatctaggtgcaaatatttcaagccctgttatagcaaggtagcatattattatatgctttcaactttcaaagctaattcacatgcaagccagtcgctatgcgataaaccgagggaaaaaaaaggaaaacaaaggtatcacaaaggtatcacaaaagccgatcggatgcatcaatcattcgcaacaaatgccatctccccacagtgtacattattctgccgcgccggtgtcgacagacgacggtcactccagtccatatcaggcccaatctgctgtttccagtgtcggccagcttcgagtagggcttgcgccttggtcttaatcgtcgatttcccatggaccttgctaaaggcctcgactgcgatctgttccactggcaagatcatggtccctttgcgggcactccggtcacccataactgaagggtgattcgattgaatttccgctagagaatttatccgattagacattttcttcagaccaaaaacatcgtgtgtggatcagccccatggaggagcatcaagcgcaagcaagttgtgattctcaccagttactggtacttttggtccatctccaagcgcccaagccattttggaaatgtgctcgctcgacaaatgcctaaacatatcggctgcagccattggtgtcttattgtcacagtcttcccatttgcacacaagagagtgtgggatgtgaactttcacaatgtgagcccgaactgagtcaaggttgtgaagttctgcaatgcatccctcccacttgcatgggaatatttgataatgcacgggctgttcacgggggatggcaacttcaacattgttcgccacgctcctgggaggtcgtcctggtcttctcttcggtgccatcttgggtgatagagggataacaacttgtggctgcgaaagacaccttgcctctggggatttgacagtccgattagagtctgattggctcttgacagtctgcccttgaggtgtaggctgcgttatagattggggggtcgcttgttttctggccggcggggattttggtggagctgcactctttgtggtcgagggtggtcgctgttgtggtggtggttgcggttgcggttgcggtgacgggggggttgggaatgggacggatttgcgagacgagaaattcggcgacgcaggcacggggtcaattctcggaagtccagaagggaagttggaagaaaatttatgtgaagaataatccgtcggagcttggaaagacaaagtaccccaagggttgaaacctccagaagcgcgcgcgtcgatactttccggcgttgcgacttgacggtttggcggtgtgtcacgcgacggcagcgatgcgtggtcacgtgcaatcgcatgatttggtgtagcacgcggaagtaattgctgatctgcttgcagcgattgaggatgaggtggtcgaagaggtggcatttgtggtggttgaggatgaggaagtggtcgggaatgagtaggaagtggtcgggaatgagtgggaagtggtcgagaatcagtgggaagtggtcgggaatgagtgggaagtggtcgagaatcagtgggaagtggtcgggaatgagtgggaagtggtcgagaatcagtgggaagtggtcgggaatgagtgggaagtggtcgagaatcagtgggaagtggtcgggaatgagtgggaagtggtcgagaatcagtgggaagtggtcgggaatgagtgggaagtggtcgagaatcagtgggaagtggtcgggaatgagtgggaagtggtcgagaatcagtgggaagtggtcgggaatgagtgggaagtggtcgagaatcagtgggaagtggtcgggaatgagtgggaagtggtcgagaatcagtgggaagtggtcgggaatgagtgggaagtggtcgagaatcagtgggaagtggtcgggaatgagtgggaagtggtcgagaatcagtgggaagtggtcgggaatgagtgggaagtggtcgagaatcagtgggaagtggtcgggaatgagtgggaagtggtcgagaatcagtgggaagtggtcgggaatgagtgggaagtggtcgagaatcagtgggaagtggtcgggaatgagtgggaagtggtcgagaatcagtgggaagtggtcgggaatgagtgggaagtggtcgagaatcagtgggaagtggtcgccgagcttgtaccataggaacacgggcccctggtaccgagctacctgcagatgggtcgtttcggggaggcattgtttgacttccgccattgtccaaccgtcgcatcttcgcgggtggcatagaaccatgaaaatgatcttgggatggaacccaccgtttttgctgatggggcggtggtatcggcagtgggtgaccccgcgactgcgcattcccagcagtaggctgctgtgccacggccgagtcagaaattgttcctcgtcgaggacctgaagtatgcgaagagttgtgccccgtgtgagaggccacggggggagtgaatgacacagaggctgaggataccactggcgtgctctgtacgttttgtcgggagatcggaggcttctggtttgtctggtttgatgtctgtgtagggggcgctggaggggcaggggcaggggcagaggagacaaaagaaacagaaggactgcgagttgagacaggctggaatgttgcggggctgcgaaccctatcaggcgctattggtacggctgactgcacatgatcttgattgcgaaatgagggtaaaggcgaaattgggtttgacctcgcggaattagtagacggaccctcccgagtgctcatggctggtgtaatcgaatggcgggattcaactgtgctgcgtgccgctgagggtttcaatcccttcggcgagtccaaagcggtgtcaatctcagcacccatcgagtaggagcttcgcggcgcattctggtgaggtgatccttgagcattctgggggatcgtggaatggctttcatatgggctttcatatggactctgcgattctcggggccttgttaccggtacatgtgtcctttgagctgcagctgaaatatatacttgttgcgtgtcctgggcaggggtggtagagtagctctgatacggtcttttatgtgattgggaccgtgccacaggtgtatgtgtcctttgaactggagggatgtccgtagtggaataaggtgatcgctgagtattgtggggtggaattgtagagtgggtgtaagaaggactttgcgatgcggacgttctttgaacttgtgctgccattccttgtgtcatgtaccgctgcatcgagatctggaaattctgatttggggttgccgagtagccctgatacgggcttcgtgatgtggacacagcctgtgccatgggttagctcgttctctgtgtagaggctgtcgatcttatagtctcgcggaccctatgggtgctttgatgggcctctgaggagcttactctggagttagaagatctctgcgggggcccaacaggaatttgggcgcggcgatatgcatcttgacgtgccagagcatccgagtctttttgggacagagcggagggatttggccgttgagttatattgcgagagcgagctgtttggtattcagaggggccataaggagcattgttggattgaatattgctatttcgttggtgtttatttcctccatactgttcacccgaggcttgggagtacgcctgagacggattcgaggcatgattaggataggttgacctcattaacatatatgtcttctgtgcctgctggtgcataacggccgctttagccacctcctccgcatcgtgaaatgccggatgtgtttcatgagcctcaatgtcagaactggggtcgtggccggtttgagtatcggctggaagaaaatgctgaagccaatcatatccgtccatgcctccgtgaaccatttcaaattgtaccgaggctatatagcagctataagcgcatagctaagatgttgtaggaccgagcaaagagaaggcttgattagattccgttgcgcatggagggttggatcgtggccggacagggggaaagcgggtataacagatagactcaaaaatactagcaaacaaaaaatggcaaactgaagaatcaaggaaggaaacttcccacggtgctgcaaaagcgcggccaaagagctctggcgatgtcgagccacattgagaagcgcgtcggaggtggatcccgctatcagccaatcataccacgggcttttgtggccttagaggtcaggtgtctagtcgcaagccctgagatggcttagcgggaaattagtaagcacacaatcccggggctccaacttggaatattcggctacaccagaaaagatcctctcttcgacccaacgccaacgacacccgttcatttcccactcacgacctttaagatggctgtccgaacccacggtgcgtactctctcgcatctcgccttgcgccgatttgatttaccactgctcgaaacccctatcaatacgaattttcgccaatcttcaactttcaatactgatggtgtctccaggtatcgcctcttcgcggagcaagtctcgcaaggcacacttccaggccccctccagcgagcgccgtgtcatcctcagcgcccccgtctccaaggaactcaaggagaagtacggagtatgtaccacatgaacctccaaatcgaatctgggtctgttcgggtcgagtttttggaattggaaactacggacgatacaggcgccagaatggttcaatacgcgacgattctaaccagtgttctgtgatagatccgctccattcccatccgcaaggacgacgaagtcggtgagtttcattgatacaacctgggaataatctcgagatctcgaaactgactactatatgcagttgttgccagaggttcccagaagggacgtgagggaaagatcaccaacgtctaccgtctcaagttctccatcttcgtcgagaaggtacgattcgaattcacatcacgcttattgcggatacttactgcggttttagatcgttcgcgacaagagcaacggccagagcgttcccattcccctccacccctccaaggttgtcatcaccaagctgcacctcgacaaggaccgtgagcagatcattgagcgcatcgccaagggtcgtgaggctgtcaagagcaagtcgacttaagggatttcttacgtgtggggtataggttcatgttgcaatggcggttgacggcgcgggttcacttgaaggactctgagaaacggagtttccagcctgctatgatcagggtaaagtttctgaaaccaggtgcattgcgatgaatgaaaaatgaacaaaaaatttcctttttcttctatccggagtcggtgctcgcaaggcaattcactttgcgcagccggcgttcttcttccttcgtctcccgcgcacataggaacctccgtcgaatgctacagctcaatcttcaggtcattacgttccttgtccagtttgcagctcgtccgttctagcatgcttttccttgctcgattttgtagagacctgtctccactcgcttccatctcttttcctctctattggaaaccagaggtgtcgcctgatatatctcctcgtcaatcccgtccttttaggacggatcccatggttgaagaggtaaacacttggcgtaaactattaacagggctactgggaagctggtagcctctgtctcacctgcagactcactctgatgccttcgggcaaggacgaagtgggtttgaaggtgaggtacatatcctactccaagttggggtatatgctgtaaactgtagggatcatatcttcggtgcgggggatattggatagtggatattttcaatcgatcagttgatttacttgtctcaatgttttctcttcaattttctaacatttgtcttcgttacttatcatttggtatctatgtacctatggataggaaccccgcatggatggtatgatgctggctgcatatcgtcaagagcggcagattgcagtggctatggaagagatcaacgagatttcgatgcgcccactgttaggagctttactgtctaaccatacgcactcaaagatggtcgtttctttctaaaactcggtgaaaaatttgcttatttgacttatggatacatatcggggggatccgatgtatatattgtcgccttgctcagtagaatcagtggcaaaatcccaactagacaaccaatcaatcagcctatgaaatctttataccttattgcataaacgttcacttctttagaaacaaacaagaaattcatcatttacaatagcccaagtcttgacaagaggagacatctgaaagttgagacataccagacctactggctagacataagtcaccactcaagtccttaaaaaatatatgcaaacttcaatatcataatgaatacaaatcagatagctgtaatatacaagctcgagtaagaaaataatccaagtagtaaaaacggagcaaactcagaaaagcagaaaagcagatgaccatcgcatcgtggtctcatgagaaagtcgaaacccgaagcaaccccagagactggatatttgaaaaaaaaagcacgctcgctgaaatattcgactagccaccctagagtgcgctagtgtccaacacacttcccccatgcaggtagtccacaccccataccaatgaacagatacagcaagaagataatgacgatcacaatcataatcatcaacttggtattcttccaccacatccgcctccgcagtccccggctacgaatccggaagtcatgcgcacttccgccaagccgatccgtcttgtcaaccagcagatcaatgcgctcgccgcgctccaggacccgctcgatattctcggtcataatatcgcggacgctatcgatttcgcgccgggcggacgcgagggagtctgctggcggggcggtgttgtaggattggaggagagagcgcagctcgttgttgaaggcagcgcagccgtaggcgggcagtgtagcgaagtcggttgtggacgggttgtaggtggttaagaacttgcgcttcatttctagcaggtaggcgaatgggatgcggcggccttgctctgccgatgcaactaccaggaagctcaggggagcgtgtgagttgggctccgcaatgttgccatcgccggattggttgccggttggcgagtcggcaatgtaatggacgaacagtcgttcatgggtgaaggtgagcttttgtggcttgtcgtgcgtgatctttgggaggatgattgaggctagtgacgaggcggcactcgttgaactacccggcgaggagtgctcggccagaatggtagtgcgataggcgatgcatgagctgaagttgattacattgttagtccgaaaatagtttctttgactgctcaaatgtcagacagcaagacttactagagcaaagagctcgtcttggaggatgaggccatagtgatatgatgtcagtgccgtgacctcaaatatataggacccgtagtagaaaagaggagtaattggaagcgatggaagagctacagtttccaagcgcttgtgatactcagatataggacctaaatcgtttgcaaggtccggtggcagttcgcccgcctgcctacgtacgtgcccaggtgcgcaaagacgctgagtcagcggcagcggaccttaacccggaccggttatagctctggagttgttggtgtcttttatatgggatgagattattagatgtcaggcagagttgttcatctaatacatttaggcttccaactgatagtcacaaccgaagtgttttgtatacaatcttctattggtcttattgcagtagaattccaagcaaagaggatcttcacttcctcatgtttaaagtcatcttctgtcagtgatgtatacgctctgaaggaggctatggataatacacactggacaagacttaaaataaatgggatcattggctcgcttatggtagatggggtgattataagctggacacttcgtacttctagagttgctattttgatactactagtacctacattcacgaagtacggagtacctatatcaatcatctgtcatctatagtagagatatacagagcacaccgtaggcgatcttgtgcattatcgggtacttatttgctttagatctcgatgctttctacacacatatcactaatacaagaatagccccaaagaattgatgtagaatttacatacaaggcatacagttctatgtaaatgcaagtatctaggccttgctcatgttccacactgaatagtacaccaagatattttattttaaaaagtatggaagaataaggagaacaagaaggagaagagagagctgtctaagatgacctcgggaagatccgaagtggcggacaccattaatcaccatgtggtcatggccatgtcattatcctttttcgatatatatccagcgcggaattgattctcctgttaagcaattgaatctcccgaaacaacattactatccaaaacaacctcatttataacctcaatcatgattagcatgtcagaagccttctatcaaggtcggagaccgatgaagtcagtatctgccctgggagtagatgttctatactgacacagaatataatcagaggtcgcagcatcgccttgctaagtgtctttggcgtcattggtggtacagctttaatgttccgcttcctagctccccagccaggcacgctcaatacgagcaaagaggtagcgacgtaccggggtggcgagtctgaacaaacagaccaaggcgataaatttggacgcactgcccacccgcctcgaaaggaatatccagtgtccaggccaaagttttaaggggaaatggtgccgggaagcatgaagcgtactaggaaataaggattggattggctagaaaggttggaatattgaagatttcatgtatggattgatgaatattgaacgtcgaagccgttatgtaccccgaatgagatggtatctggtatccgcaaatcaaaaagccaacgcgccaggtcaaaagtagatatctagaaagcaaaagatcctccgaatcaatttacaggaatttttacacggtgctagcaccaaaggatagaatgtactgaatagttaagaagacggcagggtatcatcacccggctgatttcctgtgaatgggtcttcaccactagcagcccggcttgcaggtgaagcgacactcttcttcttcgagtctttcttgtcacgcttcttcttctcacgcgtagccccccgggactcgtccggtcggcttgggctgcggctagactcgctgcggcgaagatctttgaattctttaatcacctcacggaacccttcttcgatgttgttcatgcgagctagaaccaacttgctgagcatgtcttgggtttgggttgggggttcacgacgaacgggtggggcaaatcctagttgggtctggaaacttgacgggagggcaccggaaaagccactcgccacggccttgttgtcgcctagatcagatcccagatcgtagagaagggatgatcgaggtcgggtgcccgtggaccgattagttaggtaatctatatcgggaacggacatatgtagtccaattggagggttccgagcacgagatatgtcgtgacgcttcatggtaccctgatctaacgaggtggaggcaaaagggggtgattctccatcggaggaatccgtatccggccgtgtaggtgtgacccggccttcggtctcttcatctagagatccaactggattgtacaacatggtgaccccagaagcattccgtgtatgtctgatgcgacgtgtagggctgttgcggcgcgacatcattcttgcggtagatggacgagagctgtagaacttgggcgacggcctctccgcaccttcaaccgagtcagctgtctcacccgtggaccctagagccgattgcttgttatcatttgagtcaccatcgttgctggtaagttcgtcatcaccctccatgtctgtatgaagggagagttgtcgtttctgagtgggcgagatagagggtcttgtgcgccgagaccggatgactgggctggctgcgcagcttgttcggtcctcaggattcgaagcaactgatcgggtggtttcggtgaaatctcgaggtgggttagataatctagcgcggaatggaaatttgaatcgttgtcggtgcatgccatgacggtccgcaactagcgagtccacatcatcgggtccattagctggtccagagccgatctcctgcatccagtctttgatgacattattggtctggcgttcatgcacagtgcttggtggccctcgcattcgatcgccacgatatgggcgtcgaaacacttcctccaacgcccgatccttctggtatgttgccacagatggctcccgtctgagaaccgatgcactggtgctgaaaccacggaatcgacgtggctgttggatatgagctggtgtttcattttgtgaagtaggttcaattagatccatcggctggacgactcgagaactgaggattgtcttctcatagaggcaaattgtaaataatatgggtaagtgggttatcttgataatggtccgattgagccgaatgaagtcacggaacggcatcagggatcggaatggtgtcactagccaggcaatgatgtttgttggtgccacataagagaacaaagcatcagacttgaccatcgagatggtattgacagcgaacaagaactgatgttcttcatttgcattctggacaattctcatgaaagaattggttagaaccgtgatcaagatagtgacgacgacgaaatgacagatgaacaggaaaaccgtcagaattgttctccctaaaaagttgtattcatcccacattgcccatgcggttggcgtaaatcccatcagcatctggaacaaaccataagccaccactttgggggacttgttgtctccaaagtacaagaaagagacaaaaaagccagagcaagaaatgacgatgagtacgaagacggcaatcaggtctgaggccattattcggaaagcaatgaggagttgggagaagtagcgataatgatccaatatagaaaacaacctcgggaatagcaagggagctgtagctgtaagaacatcgaactgagatggattagcatgtgccgataaaagtaccctggtaaacataaaaacgtacggcttgatcggcgatgtattcacttctagggtaggtcaggaatgtgccgtatatcctcaagcaataatatgcgaagagcaatagcaaaatcccgacgtcgaacagattccagaagctcatcagataaagactaaagccttgctcattgaacccaacaacttcatcaagcatgaatccggcactccaaaaccagaataagatctcaagagatgtaatcctgcggctgcgctgttccaaaaccgccaggaacagtcccaagagtactgcaaaggatagggtggaaagaaactgccgatagcgcggcactctcagccgcgataatttgaacaaagatgcgtcccgggggttgtagatcgtcactgaccgccgaagtatcttattgctggactcggtcgtattatcatcattgggatccattgttgccccataatccaggtttccaccttggttcatgctcatagagcgatggagactgtcggcggccgagtggaagacaaccgtccctgcccagatagcctccaattgttgcacgacgacaggatgggccaagaatcgcttggcctgcgcgcggatagcaacctctaagcatgagacacgggccgcaaccacccgtttccgatgagggccagtgactaatattgtggattgatcctggccctgaagtggatagaactcgtaggacagcgcatcgatcaattcgcgggtcgagtattcccgcaatagctttatcgccaacagttcactgaccattgcccgtgtctgatttgccccgctattccccggacttaggtgtatttctctctcgaattgcagacagttggccatcaatgcatagagggtcgcgcgcgaaaagtgggccgacatgattttctgcaggatcggcttgatcaggaactgggagacctgcggcgagcgtagttggtcccatgtgagggtggtttcgcagcgtgaagcgatcaaaggacgaatggcatgggtgatgttgtaaacaggcagcgcatctaatcatgttggtcaattgtccgtatacaccgtacctcaaggatctccgtacccaaatgcgacgcagagaacataggcaatagaggtgtagactcgagtggtccgtcctcttcctcttccccttcctcccagtcctggtccatatcttcctcatcgatttcgtgaagctctggcgcatcatcgctgctttcatcggctcgagggacgcgtcgcgagttgttgtgtgtggagcgaaaccacggggagggggttgagaatggggactgctcgacctgcccgcgctggcgctttggacgcagcagcgaggcgaacatggcgaggaaacttcaaggtctaaatcagcataaccgaagttgtttgttgggaggttgtaggatgctagagcattccggaaaagagcgcgcgagaaaactaaagagggaaaagggcaggagaccaaagtaagaaggtgaaggtttgctcaagcccaggtgaaagcggaactaactccaaagatatcgtatgtaccttttggtgttagagggaaatctaagttcttactatggccaaccccccacgtcattgtgctgataaccccggttcactccttgtaagcttatttgttcttcggtgtttaccctttcatacatagatcttagatcttagatctttaaatgtttaaatgtttaaatgtttaatctttggactgtccaatattatatcagccttcagttttaagggagatcgcttattatcttggccgtaatcttgattccacagtatgcagaggatgtacatccagagcctgcatatacagatgcaacagaattcgacaggtcagaaatactcgccacacatgtaacagaagggatgaccggcattgtactacacatttttgagacgagacagcaagatgtcttatatatatatctaaggtttttctgctccgtatactccgtaaacatgtgaatacccgactgccccaatatacgatatcgttatcggcccactgcccgtgcattgcatcatatgcagtaacgcgtgcatgtagatagagaatcactaatcccccaaacttctcaattgaaccgtataccataaaaaaagagtactacaatagcacaatgctctctatagaaaccagagcaacggaaaatctctgcggtgaaacggattgtccgaaagcagaaaaagagtggggctagaaaaagctttttgcatgaaaatattttctgccgaacttgctttttctctcttcctcctccacagctggttgcagcaaacagtttcttgtctttccttctttatatatctatactcccttctgcggtcctttctttccttgcaagccaaacaaacaaaatttcacagatgaactagagtgacctgctcgcacgagatcgcactagatcgtccccgagaggacttgttccctcacaccaattacgatgtctcccaattcccttgaggatccaactctgcctaccagcccacacctgggtagtgtagtcggatacccagaggcccagtccaacatggattccgtcagtggagtgatcaagccggcctccatcccaattcggggtggctcagaccggttggtcgccctcgaactcgcagatggtactgtctaccaaggttacaactttggtgctgaaaagagtgcctcgggtgaattggtcttccagactggtatggtcggttatcccgagtctatcaccgacccttcataccgtggccagatcctggtcatcactttcccgctcgtgggtaactacggtgtcccttcgcacgatgagatgtgtgagctcctgaaggacttgcccaagcacttcgagtccagtcagattcacatttcggccttggtggtggcatcctacgccggtgaggattactcgcacttcttggccaagtcctccctgggcgattggctcaagtccgagggcattccggctatgcacggtgtcgacactcgtgctttgactaagcgccttcgtgagaccggtagcatgctgggtcgcatgttgctgcaaaagtctggctcccctcccgatgttgctgctactagcggtgtcgactggaagtcacacttcgaggagactgaatgggtggatcccaacacaaagaacctcgtcgctgagggtgagtgatctaccaagcttctacatgaaaaagtaaaggttttctgacatcattttttattcttacagtctcgattcgcgaacctcgcctattcacaccccccgccgatgtcgccctcaaacacccctcgggccgtggagtccgcgtcctttgcttggatgtcggtatgaagtacaaccagctgcgttgtttgcttgcccgcggtgtcgaggttctggttgtgccatgggactatgatttccccacccttgctggaaaggacttcgacggtctcttcgtgtccaacggtcctggtgatcccgcgacccttactgttaccattaagaacctgaccaagatgttcgaggatgctcgtactcccgtcttcggtatctgtctgggtcaccagttgattgctcgtgctgtcggcgctcagactaccaagatgaagttcggtaaccgtggtcacaacatcccctgcacaagcatgctctctggcaagtgccacattacttcccagaaccatggttttgctgtggatgccagcagccttcataacggatgggaagagctgttcgtcaacgccaatgacggcagcaacgagggtattcgtcacaccagccgtcccttcttcagtgttcaattccatcccgagagcacacccggcccccgggataccgagtacctgtttgatgtgttcatcaacaccatccagtctaccattgactcccccgaggctctcaacatgcctgtctccttccccggtggcaccaaggccgataatctcctggctgcccccaaagtctcggtcaagaaggttctggttcttggctccggtggtcttagcattggtcaggctggagagttcgattactctggcagtcaagccatcaaggccttgaaggaagagggtatctacaccattttgatcaaccccaatattgccaccattcagacctccaagggtctggctgacaaggtttacttcctgcccgtcaacgccgagttcgtccgcaaggtgatcaagcacgagcgtcctgatgccatctacgtcactttcggtggccagactgccctttccgtgggtatccagcttaaggacgagttcgaagaactcggcgtcaaggtcctcggtacccctattgatactatcatcactactgaggatcgtgagctgtttgctcgcagcatggattccatcaacgaaaagtgcgccaagtctgcctctgcttccaccctcgaggagtccctgcgtgtggtcgaggacattggtttccccgtcattgttcgtgccgcctacgctcttggtggacttggcagtggtttcgcggaggacatggatcagctgaaggagctctgcactaaggctttggccgtcagcccccaggtgctgattgagcgcagtatgaagggctggaaggagattgaatacgaggttgttcgtgatgcccaggacaactgcatcactgtctgcaacatggagaacttcgatccccttggtattcacactggtgactccattgtcgttgctccttcccagaccctctcagacgaagactacaacatgctacgaaccaccgcagtcaacgtcattcgtcacctcggtgttgtcggtgaatgtaacattcagtatgccctcaaccccttctcgagggagtactgtatcattgaagtcaacgctcgtctgtctcggtcctccgccctggcctctaaggctaccggataccctcttgctttcattgctgccaagttgggtcttggtatccccctgaatgagattaagaattcggtcacccagtccacttgcgcctgcttcgagccatcgctcgactactgcgtggttaagattcctcgttgggatctgaagaagtttacccgtgtgtctactcagcttggttcttccatgaagagtgtcggtgaagttatgagcattggccgaaccttcgaggaagctattcagaaggctattcgctcggttgatttccacaacgttggtttcaatgagtccgatgccctcatgtccatcaagggcgagctccagactccctccgaccagcgtctgtttgccattgccaatgccatggccgccggttacactgttgatgacatctggaaactcaccaacattgacaagtggttcctcagccgactcaagggcctcagcgacttcggcaagtccatgtccaccttcaatgctaccactgtgcctgtgcctatgatccgacaggccaagcagcttggtttctccgatcgtcagctcgccaacttcttggactccaacgagcttgctgtgcgccgcatgcgtgttgaggctggtatcacacctatcgtcaagcagattgatactgttgccgccgaattcccagccgtgaccaactacctatacctcacctataatgcttctcagcatgacctgacgttcgacgatcacggtatcatggttctgggttctggtgtctaccgtatcggttcctctgtcgaattcgattggtgttccgtgcgtaccattcgtacgctccgcgagcagggctacaagactatcatggtcaactacaacccggagaccgttagtaccgattacgatgaggccgaccgcctttacttcgagaacatcaacctggagactgttctggacatttaccagctggagacttccagcggtgtgatcatgtccatgggtggtcagaccccgaacaacatcgctctgcctcttcaccgcctcaatgtcaacatcctgggtacttcccccgagatgattgatggtgctgagaaccgttacaagttctcccgcatgttggatcgtatcgaagttgatcagcccgcttggaaggagctgactagcattgacgaggcccgcgatttctgtgacaaggtcggctaccccgtgctggtccgtccttcatacgtgctctctggtgctgccatgaacactgtgtattccgagcacgatctggccagctatttgaaccaggctgtcgatgtttcgcgtgagcaccctgtggttatcactaagtatatcgaaaacgccaaggagattgagatggacgctgttgcccgtaacggtgttatggttggccacttcatctccgagcacgttgaaaatgctggtgttcactctggtgacgctactctgatcctacctccccaggatttgagcccggagaccgtgcgtcgcattgaggaggctacccggaagatcggtaatgctctgaacgttactggcccttacaacattcagttcattgccaaggataatgacatcaaggtcattgagtgtaacgttcgtgcctcgcgatcgttccccttcgtgtccaaggtcatgggtgttgacctcatcgagatggccaccaaggccatgatgggaattccattccaggagtacccccctgtgtcaattcctaaggactacgtcggtgttaaggtcccccagttctcgttctcacgtctgtccggtgccgaccccgtcctgggtgtcgagatggcctctactggtgaggttgcctcgttcggtcgtgacaagtacgaggcctacctgaaggctctgttgtccactggattccgtcttccccgccgcaacattctgttctccattggttcctacaaggagaagcttgagatgctaccctcgatcaagaagctccacaatcttgattacaacctgttcgccactgctggtaccgctgatttccttaaggagaacggcgtgcctgtcaagtaccttgagcatcttccggaccacgaggaggagcagatgaagtctgagtactctctcacccagcacttgtccaacaacctcatcgatctgtacatcaacttgccgtccaacaaccgcttccgccgccctgccaattacatgtccaagggttaccgtactcgtcgaatggctgttgactaccagactcctctggtcaccaacgtgaagaatgcgaagatcttgatcgaggctattgctcgccacttccctctgaacatcatccccgccgactaccagactagccaccgcactgtggtcctccccggtttgatcaatattgctgcgttcgtcccgaaccttgtctccgttggttccaaggacttcgaagctgtttccaaggcttcgatttcaggtggtttcagcatgatccgtgtgatgccggtcggtgttcacagctcggtcacatcggcccgcgacctcaagattgtccagcagaacgctctgggcaagtcgctctgcgacttcaacatctctgttgctgccactgccaccaactcagaccagatcatccagatgactggtgaggttggctctctcttcgtacccttcaaccacttgtcgggtaacatcaacaaggtggccactgtcaccaaccacttcagctcctggccctcaagcaaacccctgatcacggatgccaagagcaatgatctcgcctcgattctgttgttggccagcctccacagccgtaacattcacgtcatgagtgttacctccaaggaggatatcagccttattgctctgagcaaggagaagggcctgaaggtgacctgcgatgttgctatctactgccttttcctctcccgcgaggatttcccgacctgcagcttcctgcccaccgccgaggaccagcaggctctatgggaccatatgagcaccatcgatatcttctctattggcagcattcccttccagcttgctggcaagcaggctactcccgagtccggcatcgctgaggctattcctctgctgttcaccgctgtcgccgagggccgcctgaccattgaggacatcaccgctcgtctctatgagaaccccaagaagatcttcgagctgcacgaccaggccgatagctcgctcgaggtcgaggttgaccgcccctacgttttccagaatccccaagcctggtctccgttcaacggcaagacgttgcgtggctccgttcagcgtgttgttttccagggcaagaccacctgcctcgatggcgagatcaccaaggatgccatcaagggtaccgacatgtccactcaccgtatcgtccctacctcgcctgtgctgaagcccgtgacccccatggttcgcccggagagttcccttgacaaacacgggtctatcggtggtactcctggccgccgcttccgggccctgtccagcgctgtcggcgaacttggtcctcctctttacgtcgcctcctcgcaggtctcaccctcgctggctgatatgctctcccgatctgctttccggggaaagcacatcctgtctgtgaaccagttctctcgcgccgacttgcacctgctgttcaccgtcgctcaggagatgcgtcttggagtccagcgccacggtgttcttgacctcctgaagggccgtgttttgaccaccctcttctacgagccctccacgcgcacctcggcctctttcgacgccgccatgcagcgcctcggtggacgtaccattgccatctccactcagcactcttctacccagaagggtgagtctctccaggacaccatccgcactctcggctgctacggtgacgctgttgttctgcgccaccccgactcgaccagcaccgagatcgcggccaaatactcccaggtccccgtcatcaacggtggcaacggtgcccttgagcaccccacccaggccttcttagacttgttcaccatccgcgaggagttgggcactgtcaccgggttgaccatcaccttcactggtgatctcaagtacggccgccccgtgcactccctcatcaagctgctccagttctacgatgtccgcatccagcttgttgcccccaaggctctcgctctccccgacgatgtccgccagcagatcgttgcttccggccagttggtcctcgagtctgaggagctcactcctgagattgtcgccagctccgacatactgtactccactcgtgtgcagaaggagcgcttcgtcgacattcttgagtacgagcgtctcaagaacacctttatcatcgacaacgctctgctcaagcacgccaagagccacatggttgtcatgcatcccctccctcgcaatgccgagatctccgaggaagtcgacttcgaccagcgggctgcttacttccgccaggtatgtttctgaatttcccttgctgtctctgaacaatgaactaattgcattatagatgcgctacggcctctactgccgcatggctctccttgctctcgtcttggcgccatgaatatgatactcttttgccattctaattatgtgggaaaggaggatcccaaaagcgccatggatttacgtgagacgttttgttttccttgttgtttgaaaagttatgtttttcgatactccgtaatcagcgtgataaatcgctgtatagattagatgaatctccgtttcatttgacggtcccgttcagtgtatgtctctatttctatgtgtgtatgttatgtgatatgtgtcatatgtgtgttatgcgttatgtgtgttgtgtgtgtgtcgtgttttcctttttggggtcatttgggattctttcggggtcatttcggggatttcggggattcttttgggacttggcgtcttttttgcattttatatacccactctgacaatatacttcattaattcatctgagcccgaactttttttcaagtttggaacacccagcgaggatccttatccccttggaactctccctccgcatcacccacgtctcccatcaacgggctcagtccccggacttccctcagacgctccttttcagcattttcccgtcggagaacgtgccataggatcccaacaaccataatgttggcaactagatatcccaaggcaaatccatgacccaggaagtaccgcggggcactctcagcgcggtaaagctgtgttccaaggaccgcacccagattcccaattgagatctgcatggcgttggcaatgcaacgcttagtctggccggacacattattggcgggccaggacagcacaatagccacagctgggtaaatgcctgccgcagcgaagatagttccaacgtaagacacgccagcccggtgctgtgacagcaggagaatgtatccgatacatccaacggcagatgatcccatgataaacggggcgcgactgcgagtcttctcagaagcaatcgcaacaccaatagttgagaagaacgacactgcgtacggtggaacggacagtagctgcgcctttgcggctgagtatccgagttctttgatgatggtcggaaggaaaagtgataaagtatacagtggcaaggacattgtgtggaagccaagtccatatagccagactttggggtctttgaaggcatcctgtactgccgaccaggtgaattcctcatcccgagtggcatcgctgtcgttcttcagacgcaattggatgaactcccgttcttcttttgatagaaactcggctgttgatgggtagttgtatacccagaaataggcgatgatcgaagcaacaatggtcaacagtccttcctaaattgattgtcagctatgatagtgcatggtatagttgatcgggacgcaccaagatgaaaatccacctccaaccattcaagtttcctacacctttcatgtgagagattgcctagaaacccattagcttggttatctaccaggagaagaaaaccaacccaagccaggataccaccaaaggcacctgccatcgaggcagagctgaaaaacagagccacgcgataatgttgctcgttccgcttataccacatggacagataaaacaccacaccggggaacaatccgctctctgcaacacccaggaagaatcgcgaagacagatatccagagtaattctgtactactcctagaagtgtagctactactccccagaccagagtgagagtcggaagccatattctcggggtggttttcttcaagacgatctgaatgtagctgttagtctttgtacaggacatttatattcataggcgttactcacattgcaaggaatctcaaaaataacatagccgataaagtacagagtcaggcctgtaaggtactggtctcctgctatattccagttaatcctcggatcaatatgaagacacacaaaacgtacacattttgatgtcggtcgtcattccttctagacgggcatttcccacattgctgcgatccaaaaaggagagcaaatagagtaatgtgaggggtggcaaaagacgatagtccaatttccgtaacaaggccttctcgttgatgcccttgatacttggagaatcgctggcgtccatctcggcgccagtgcgcacatcgtccttttctgaagtagccatagtaactcacgggggactcagtcttgaattgaggcttggattaaggctatcatatatggagagagggggataggagaaatatataacatttagcacaccatccattaccccgccaataaatcattcttccatagagagagcgaataaggtcaccgatataggtgatatcaaaagagaatgagcaacattggggctggaatgacgagagctgattccatgtgaagatcggcaagatgcatgaatagcgtattctacgagtcctatgttacaccgtgaagtatagaggtcgtataagcggccatctgttcttattcttacttactacaaatccatggaaatttctcaggaggttgatatgacgatcagagtacttcatactgtaagaaattacttcaaagaaggcggatgaaatgtactatattgtttagttggatctttgtatttctcatgtctatgctcagtctatagtggtactcccagaatgtatgttcgctaattgacacacctggccatgtcttacccttcatccgtcagctcatgctttatccggccagtacttctgtacaatgtccttcttattgaccttgcccatggcattgcgctcgattccatccacaaccttcaaaacagttgggattttataaggagccatctcgttcttgagcgcagcgcgtagagtaggaagatccagcggtgtagtctatgtcactgttagttatgcaaaaagaacagttgcccttcatggactcaacgaaaacgtaccccttctcggaatttgacaactgcagcaactcgttgcccccattcctggtcggccaatccgactatagcaacttcttgaatcgcatgaatggccagcatcttgcgctcaacttccaacgccgaaatcttatatccaccggatttgattaagtcgacagaagcacggccttgaatgaagtatgcgccgcttgaatcgcgtttagcgacatcgccggtcttgaaccatccatccactgtgaattccgaggccgtcgcttccggcttccgccagtattcgtagaagacattaccgcccttgatctcgatcatgccgtcctcatccacttcgtccacaatacgaccggtttctttttcggtcagtcgcacctcgacaccaggcaatggccatcccacactgccatcgattcgcttttcaatctccagcccacagctgatcgccatgccaatctcggtcattccatatcgctccaatagaacctgaccagtgatctccgcgaatttttctttgatgggggtgggtagggccgcagatccactgacgaccagtcgtagagcacgagctccagcccgcgcggcatcttcttgttccgtgccgcggatatgagcatcgaagtagtcattcagacgggagtaaatggtcggcacagccatgaacaaggttgaggagccagcgtcctgccaccgctcccagatcaccttcggatcgaattttggatgcatctccactgtggtaccactcaggaaactggcagccaggccattgacgatgccgtggacgtggtggagtggcagcacgtgaatgagacggtctgagggagagtactcccaggccttgaccagacagctcgcttggaatgtgatattcccgtgtgttgtcacgcagcccttggggtttgatgtggttccagaggtatagatcatcagggcgcgtcgagtgagctcaaacggcggggagaaagaaggtaaggtcggggcctcatttcgagagaatggctccagtcccataaagggtatatcagtggtgcatccttcgcgtagtaatggtgcgatcttctcaaattccgggtgcacgataatcaatgaggggtccgaatcaccgatggtgtataacagttccttcactgggtgacttgtgcctagcgaatgtcagcgtcgaatagaagatgttgcgcattgctgccatcgctttcacctacaaagtggaacgcagacacctcccgcggcccacacggcccattgtgtcgcaacgtagtcatatccattggggaccaagaaggcaatgcgtcgttcttccaaatcgtccgtcaatctcaattgctcaattatgcgcttcctcaatgctgctgcatcagctagtaattgaacgaaagtgaaggattgttgtttggtagcatcaacgaccgcgatcttgtccggatcttgtcgtgcatgttgctccgccgcagcaaagaggggtagcaaagggatgggcataattaatttgattcttggacactttgactctaaagatgaatcattcaatataagtctaataatctggaggggtaaagtcgaagaatttgagggacatacggaatcccccagggctgtatttagccgattgcggagaaaacgccatgtccaccatggacgggtgggcggcacccggatgattatgtaattatgctcaaaggtcccccgcccctaggtcttggcatactcggtcataagatattccactccgatctcggttcatatatcgcccaccagctatttaaagatgtaaggggaattggtccttcacagcaccttgtgtctgaaagagctggcaatatggccactgtcaatagcccgctactgcaaaatgacttacagcaaagctccttgggtgataccacccagacatcacctgaactcgaccgatcgaagcagcctcgagctaatatatcaaaaatattggctatatttttggctttcttaatgatgggggcaaatgatgcagcatatggcgtaagtacttcgcgaagaatcgaaatgcgatattgctaacacgcaaaagcctctattaccatatgtaagtacctatctaaaaccgtccctatgaacactctaatgaaaagaacagctcgaatcgtactacagcatctcccacacagtggcttcatttcttttcctgtcacctgtctgtggctatgtacttgctgcagttctaaacgacacaattcacactaagctaggtcgtcgtggcgttgcctggatttcctccggtaaccatttcatcggccatctctttgtatctttacatcctccataccctgctctagtcgctcttttcgtccttcagggctttggaaatggcttggcagactcggggtacaacgcctgggtcgccagtatgaccaacgcaaatcaaatactcgggattatgcacgggctgtatggatttggggctgttctaagtccacttgcagcaacgttacttgtgaccaaggctaacttgccatggttttacttttactatcttatggtatgtctttcggtctcggcgaataaaagttggtaactgatcagcagactgcttgcgcaataattgaattgatcttctgcctgggagtatttcgagactcaaccgcagctgctttccgggctgccaatcagaccgaagagcaccaagatgggaatatgagtcgagccatcgctcaacccccatatgcacgcataacttggatctgttcctttttcttccttggttacatgggggttgaagtcgcgctaggtggatggattgttacttatatgagggaagtaagaggtggggaggcatttgccagtggtatgactgccacagggttctggcttggaatcagttgtggcagaatgattcttggcttcgttaccccgctgctaacggaggagtttgccgtcattgtgagttcccctgtgtggtatattacactaaattcatctttccttcaacttgacttgatatcttttacgcgtgtcaggaggctttcatacttactaataattacgcagatctattccctgctttcaattctctgcggtttcattctctggctcgtgcccgtgttctcagtttcagcagtggctgtcacagtcctcggatttttcttaggtccatttttccctgctgcgattgtagtcgccaccaggattcttccccgggctttacatgtgagcgctgtcggcttcgcttcagccattggaggagctggagctgcgattctgccgtttgcagtgggtgctattgcccaaaggagtggtgttcaggttctgccgccaatcatcattgttttgatcatcggcattttgtcattgtggctcttcctcctacaaagcgcaaagaatatcgcacattagttacatctcaatcggcgaaacaatatcgtcggccaagtgccactatcgacgtgatcgcaggatgaacaagacattaggagagtgacacgcgaaacaagggtttttggagcagcgggggatagcgcatgttaggtccgtctgcctcggtattagggtggaaaagaataatttgttttgtctagacataataacaaaacaaatttcaaaccgaggtcgctaattcaacattcgctattactttaataaactaaagtatggctaccgcggatggtgcctgtgccagttcgcccggttggacggtgcgaggcccgtcaaacgatccttcgccattttcttccagcccacgggccaccaagtctgtgaaatcgacacccacttccaccaagagagcggcatggtcgtgcacaatgtcgaggcatttctgccagaccgatgtgccacgctgaacgctgctaagctgtcggctgagcagagcattgaacccgtccaggtgatgtttagcccaacgaatgcaagagctgctcattaccacagggaagcattgttggtagataccgatcgtgttcttgatcagggtaaaatagacataggagatctggaagatgtaaagaggtagatcaccttcaaagatacaggcactaggaaaagaagttagtatgcaaacataagcttgtgtggtggaggacgaagaacataccggatgcgttggccaatcacgtccgaacgtgccttcaggtaggtctcacgtgcctggtcttcaaaccctaaccgtgtcaaccaggtaacgtgagtcttggtagccaccgggaatgagtgtttgtcgaccagtgcccgggagagaatgccagcaagccgagtcgctcgcccatcgaccttgaaattgatgacgtcttgtgcaatgctgttgcccttgagacccttggccatttttcttagtcgctcgatgctgtacacagacgcctcaaatcgctggagcgcaatatctatatcaagttcgtccacctgcccttcaacccagcggagattctgctgtttcccgtccacatcaatgcgcaggtcaggcttgtctcttggagtatcagagaggtcaaaagactcgggcttttgcgaatgggaaaggtgccgaccagccagatatccgtatgcttcgaagggcttgctggccgcttcggtttccgagcgcatggttcgacgtaggtcctcgactgttttgcggaatgttgccagtagttcctgtttcgctgcaacgtcgtcatggcgatatgtaaagggcttgtttcccacacggatactgatcgatctcccaatgcctcgctctaaagcctcttcgcgcgcttggcccgttcccaaattggctccaagatcaatcatatcaacatcattaagaagccagcaatcttctgccactagcctcgtcggaacaggtcctcggtggttggggttgctttggtcgacccgcttacgcttcttcgcagccacgagcaggtaatcgttcaataacacaatgtgaacgggccgttttggtttccatgtggctgagtccagctcaacccaattacctgtttctaggacaatgtgccgtcctggtgcagctggaagccacttttgcgacccttccactgtcttccacaacgtttgcagctgcacgctccacatgctctcaaggttggcgaccgagctccgattcgcatttcgtttggggaaagactcctccatcggtgacatgggattaggtgagtttcctacgcttgtttgtccgagcgccgttgttagttccgccatgagggtacggagagtccgcatttcatccttgagcttctccgcctctttactgattttgataaattgtgtgcgattctgatagacattttgttgtagatcggtggatgttcggttcttgactttgcgtaggctttcttggtacttttggatgtcttcctcggacgcgttggcgagaagactggccacatctaatatcggaaactcctggttagcttgaacaagcacacagcggcggccagggagctctaacatcgatcgactggaagactgggatctcgtagagcatgcaggtcgactttcggtgctggtgaattcgggtccgatggtgatggtagtctcggaatagatgccggtgctaatccgccatgtcctccgggcatctgatttggaagcgtcggaacaggaggaacattgccatcagattcaggtgcgccattgaatcgactcgagtatcgccgtttcactaaatccgaggtcgcatcgttctgaggtgcccgctcacgtgtggggattgcggatgggcctgcatcgggagacctggtattgggaggtagaggaccggatatgggcttaggagcactgatctgagggcgctgccgacgagtcttgctcctcagagtcaatcctcggccttccatggtgatttcacttagcaatgcagcaataatcaaggaatggagtcgtctcgggaggtcaaggggatgacgctcgggctgtgggtatgattatataatccatgggctccggacatctggacatcctcgaaacatttttatcacccaactaccactcaaccactatcgcctctcaaagtcccatacattgccaggctgagaaaatccgatacgtttaattagatatcatcccacattttcgctatggctttccgaaacaccgccatcgtcgccggcacacttctgacgggagttctcggtatgtagcattcgtctcgccgcgtttttcaattattaaccctttataccagcctacgccgtttatttcgattacaagcgtcaaagcgatcctaacttccgcaaatcgctgaagaagaacaacaagaaggtcgcacaaaccgcgaagcaggaagccgaggccggcgccgcagctagggccgcagagctcaagaatgcgctcgaacaagtgaagaggaacggtgaacttccaacggatctcgaagaaaaagaaagcttctttatgagccaagtcgcattgggcgaatctctttgtgcctcggaaggtaaattgaatccattttctcatcctatctccatatcgaacgatgggatggagatatcggttacacgtcgcaatcggaatcaacaggtcgctaaatacatctccaggctcccaagtcgaagcagccattgccttctggaaagcattgaaggtctacccccagcctcaggtaagtacaagccattgcggatgtcacatattgccttcatcgtcctcttcatcattctaactgctgtaattactcaggatttgatcggaatttacgacaagaccgttcccagagaaaccctcgaaattctcgccgagcttatcgcacttgatggtggtcaatctgctggccccaagactggcaccgacgacaacatcgaatagacaactggacctgaccgcccctcaacaacttgtattttagacagatggaattctcaaatttgtatgacataatttatatcgcggagaactagtacgttcgttacccaagagccgtgggggaagcggataaagaggtgtggatgaaggctactatgtaagttggacggattgatggcgatctattgccaaacattccaattagatggagcaaaagagataccaccaatctaaagctacctctcgattttggcttctgtcctatgaagtagtataggtatttttattttctttctatgagacatctatagactggtcgattgttagaactactccataacatcctctctttcactacaaaaccttccaccatcaatcatagaaagttaatcttacagtaatatggctgtgagtactgcgtacattgaaaaaaaaaaaataagataatttatggttcttccattttgtgtactccacagcggctatgtaagacgaggaatttccacaggtaagtaatgacatcttatgcaatttctagtccccagttgatatgtggatgtgaattgaaagcaggaagaggaagaggaagaggaagaagaagaagaagaagaagaagaagaagaagaagaagaagaggaagctaagcgaatggatgagtacgagtagtacggagtagaggtcagagagacactggttggataggaggtccggagccaagggggctttccgtccgctatctattgccaagacatatgttgattccaagactttttaactttgaattgttccagttggaaacggtcatagtgggagaggatacatagagtgagagtagtatctaaaggaagagtaaataagaggttatgtatgaagtagatattccaatttaggcaggtggcattggacacccgaaagacaaggccactatttccaagccctaactaactaaccaactaaataactgcggattaattaaccacacttgggcataatctcaccactaactttataaattacagcatcgagacttatttccgtgcctatacccctgagtttggcatttcaatacagcctagattgcccagaggtggtccaagcaatcactattcaaggacatcttggccctgagtgggattcttggccggacttggcccaccaattcgtcttcggaggaaaaggaagggaaatgggaaagaaaatagaaatggacatttaatcgcttggaatacatgaatgtaattaatagtatgccactactaccatagaggactgcatagcaatatatactggatatagtgaaacgaagatgtgaaacctccaaggctctcccaagaccctccaagaccccccaagacccctattatttgttcagggactgcgattctccacaaaattgacactgacgatcaattgggtagctctacagagtagattaaaattatctcaaagccatttaactcctttgattccctttcttcctctttcctttgatttcagtcgttccttccccatttcgcgccgttgcgctgtccctcgttatctcatatcatctcgtatatcccccgcctcaagtcattccctctctagtttattgatttcctatacccacttgatttcacaatgatcgtatgtgcctgtcgcaactctattatgaccaaaagctgacctcttagtcttacactcgtctcttcgcatccgtgtgtgcgctcgccagcgccgcggctgctttgaatccactcgaagtcagcggcaaggactttgttgactccaagaccaaggatcgtttccagattatcggtgttgagtaagacttccttgcctttttcttgcctgtttcttaccccgcacattctacagtggctgacccctcaatagttaccagcccggtggtgaatctggtttcactacgaagcttgatcctctgagcgatgcagatgtctgcctgcgtgatgctgccctcatgcagcgcctgggtgtaagtctggaccccgtcttccttgccagacagcaacttatctccataggtcaacaccatccgtgtgtacaacctggaaccctctctcaaccacgacaagtgcgcgtcaatcttcaacgctgccggtatctacatgattcttgatgtcagcaaccccctgcccggtggttatctagaccgcagtgccccttggaccacatacagtgccatctactacaagcaggtgttcggtgttatcgagggcttcaagaactacgacaacgtcctgggcttcttcgctggcaacgaggtgattaatgaggatgccacttacatggctcccaagtatgtccgtgcgatcgttcgtgatatgaaggactacattgccaagaactctaagcgcgccatccccgttggatactccgctgccgatattcgtaacatcttgatggacactattcactacttcgagtgtgatctcaagaattcgacctcttcccgtgccgacttcttcggcctcaactcctactcttggtgcggtgactcctcctacaagaccagcggcttcgatgtcctaaccgaggacttcaccaacgccactatccccgttttcttctccgagtacggctgtaacgatgtcaagccccgtatcttcaccgaagtccaggccctctacggcgtggagatgacccaggctttctctggtggtctcgtttacgaatggacccaggagaacaatctctacggcctggtcaagatcaacgactccaagaccgtgaccactcttatcgactatgacaacttccagaaacagctcaacaagctggatattgaccgcatcatgtcaagcaacgccacacaaaccagtgttaaggccgagacgtgcagtacctcacttatccagcgcaagtccttttacaacgcctgggatttgcccgaggtcccttccaaggtctcggactacattaagaacggcctgcccgatgcccccgttggcaagttggtttcggtctccgctaccaccattccccagaaggtgtatgactacaccggcaaagagattaccaatgtcaagtttgaggtgaagagcggtgccaacaccccatcttcttcctcggcttccagtacctccgattcttcctctagctccggtacttccaccgccaccaatggcgcctctcctaatggcgccccctcacttgcccttggtggtgcaggaggcttcttcatactgcttgcatcccttctgtaattgccttgatgatttgtaattatttcattcttgggtttcacagttcagacgacatgaccaagaggctgctatcggtctcgaggatctattttctgtatggcttatcctattttattctttgcccagctttcttgtgattcagttgttattctttacatagttccttcggaatgattcgtgtctttgctttttctttcgtgtcttcaaactttcagcaacaagccatcgcatgtacattgggaaggagttagagacaaaatgcaccatagcaaaaaatccttccactttctgctagtgcagttgtcattaacattgttatttatcccacattttatcaacatcacagcttagaagaaggatcgtcatttatcgtagctccaatggccgcccattgatcgaagcctttagccctagttctcaagacttgcttcaacatcttggtaattccgtttggatcgttgctggcaaattaaggaatgactttgcagcgtggcctgtcattttgcgcttcactaggtttcttctgttgaaaagagatagcagggtttcactggcaaagactacttaccttaaaactcggcttgctcagtaccataacatgagtcagaatgtctcgattgatataaatgcaaagacttgagaatattaagcaataacacgaaacacaaaaatcaaaatgaaaattgcaacataactcaagagattctaaatggccctcgctttccctttgcccttgcctgacgatgatgagacaggcgttggccctggtgagagggatggaaattcctcccactccttctcaccatcctcgcgactcttgccctcagccaagctgagctgaatcgcaaactctaaatcatccatctcttgctgtctactgctctccggctcctctgctccaggggatggctgtcgaggtgggcgtactcccttggcatacttgatagggatagacgatgtttgttgctcatcaagcaggctaaggcgaattgcttcggcaagttcatcgtcaacatcatcgtccgcgggatcttgataaggagacgaagaggatgaaatcccgccagggccaaatgaactaggaccagcagtgtcgaatgaagcgctcgtggccgagctggagaccgcggcgctgtccctaggtttcgccgcatcgccagagcaggcttcctcgctcagaagttgggcatacaacaaaagctgttcctcgtcgatatccggaccaagaagatcaattccaaaacgcgcactcagatgtgctcgttctttctcatcggcaatcctttgacgctccatatccacgcgttcgtcgtggataaagtcctcgattgcaccccgaccactgttgttgaagcgctggccttcgccagccccgttgctgccacgcattaagtggcgaaggcgtcgcttgctgcttttgtattgatcagcctcggaagagctgtaagaccagtatcgcaagtgggtgccaagtgagaccattccacgcagaacagttgggtctgtatcaaggcagatagcgcctgcggcatagtaattgtttccaacacctaagaaagacgactcagcctgcacaagccgacggcgggcccgcgttgaaaaacgcgagttgatcgttcgcattggcttggtagacgatgctaatggatcccaggcttgtacgaggccatcattaccgccatgaacaaggtacaaagatgtgatggccaaggaagatacctggggggagtcggtttggattgtgcgcaatgtggagatggagttgattatctccccagacttcgccgccggggctcggatgtcccaaacaaaaaccatcccagtgcgagttccaacagctaggtatcgagctcgttggccgggaatttctagacccgaccgcggcagatccatatgtggtaacattggggaggatgcggcagacgacatagagctcctagacatggccagaagaggatcctcttcggctgtgagagtggcgaaagtggacgtatccaacgcactactgctcacctccgtcgacttgcgatcatcaaaaacaaaatccgacagacgccacgtgaagttggtcgaaggcaatgccgtaagccctgaggaccgagaggagggaaaactgctggtggcagtcgggcttgttatgtccactgggccgccgaaaagtgacggtggaacttccactgtacccgataagggccctggcatggccgatgagccaaggacaggcctaggagcagtgcgcatgaaccgccggatcgacgcttttgtatcatcgcccgagccggtagcgatgataatgattgactcgcctgccccgcacccgtcatcgccagcaaagtccaccttaagatcgcgttgcatatcccagctttcgcagaccttgcggaagtgtttgggtttcaaagaaaagaaattctcaatctccttcgtttcagcggcaacctggtgctcattgagacccatggaatccgacgatgatcgcggactgtagcttccatcgaccaactcaggattgaaagggtctgggcgtgccacacgtctgcttgcttcaaccatctcccaatgcacacttctaccagtcttccaagccacctcgtcaagctgctcgatgttgagtttggctgtgagtgggatctcaggtgctcgaggaagttctgtgaggtagaatatttcccctagggcattgagagcaacagcccaaattcggtttcctgaatggcgctgggctgaatagtgatcatccaccgcaatggaaatgataggaacaccagggcacaggacccatctagcagtcacttgacctaggtcatatcgtctttcgtaagttggatgagggcctatagaatacgcggtcaacacgcctgaagacgatccagacatcatccccaccagcccctgagtgatcttgaggatctgaggggatttggcaatccacactgaacagatggcatgtgtgatcatgtttatggcaggtatgccgagtggtgggtgagaacccaaattcgaagctcccacaaaacgaccatgctgctccgtttttgagatgaaatagctacgcccttggggacagccctcaccatagatcatgccatatggttgactgacgtccatcgagttaggcacaccgaccatatcacccgatccgaggccgtattgcgcttcaccaggaaacagatcggcaaagtggcggaacatttggtggtcggtgacaccccaggtgccaacttttacggccgatgggtcactagctgacgcaatcccttgctctgcggctccatggacgaagagagggttgttgtccggcctgaaagaggcatgtatgtgactgatcggaaagagtagctgcgacgtatacgtagctatggcactaccatggcgagcactcgccgtgtgtacagttccatgcttcttggacgggttgaactgcgccggtttgcctctggctaacgagtgcatcaagcgagtacgcaatatgtattcgcttcgccaggaggctagcgcggttagccttgcgaataatcgcctgtccgactgtaggtccaccgcatcggtattacgctgaccatcctcaacggcatggggtccggggaagaatcgcgagaaggcgatcctccaagcatgaggagtggtcaccagcgcatgaaatcgatgggacaccaatgtcatggcggacaaagattggggtggtagatgcgagagaatatgggtgagaacctctgtggagattacggttgtcagtaataattgcgcagcaggtttgcaggacacccaccatttggaaatgtttccaaagatgtttgcgattgttcaatagaagccactaagcaagatccagcattttctgcttgtccgggtggaatgcgagcattttcatgctggctcactcgatcggccgagggcggggcatggcgaccgtcggcctctttcaaggacgcgtcttgtgtcgacatgctcgggacgtccgcatagtctctgatcgcctctcgctcgaggaaatcagagacttgaggttgagtttcgtcgaggtcatgtccatgctgggtgggactaataatgactgggtatgagtcgacgggaggcgtatgttgagacacggcagtaggctctggttgcataaaaaggtcttgacggaaaggtgaagtggtagcgaccgagccagcgagaaagcctgggtcagtcgagttaggaaatgcgggacgaaaaggagttatatgaaagcgaagcgatgttgaagagaaaggatgggagagaagcaaagatgccggaggcgaggcgaagtggccatcccgcacattatgcagatgcgcagcgaccgcagcgtcctattggcttttacaattcaccgccttcttctccgcctttttccgagtaattcctatacttcaattgttatgtctgactgagattttctatgactagttagatggataactaactactccgtagtagtcaaatactccgtatttggagctcatttgtagtggatttgtcatttatatagaagtagaatagtcagccgcttatatgacctctgtacttggcggtagaggacatgaataatttggatgctaaattagttcaagatctgtttaaatgaattttctaatgtcatttccaatggcttttgagtgtgtttgttgtgtctcttctagtgtcctttccggtgtcttttgatatcagtcgcaaattatccgattttctgctggcaataaaagcgtcggtatgcgatatgcggctctgttcgactttggatattactttagctatgcgagatggagaagaaaagctattatcttactttgagtgtaatactatcttatcaactgttgtcataatcttgttaaaaaattttcaaatatttttcctttaccttctctcaggaatatttatactgaatggccactatccaagacgcgctcagcacgtgacgacgcgacagaagccaaaccaacgagccctcaggtatcatcgactatctcagtacaacttggttgtgaggttgatatgatccccctggaataacttattgatccactgtatcttctcgagttattttcttctggtgccgcatgaaccccagtatcccgcataaacgccagagctgggtgagacacgtgaattcggtagactaagatgcctggagcaaatggtaagacattcccgatactgaatctatattcagcttactgatctccgtacagaggctgaaactattcgaattctcatctccaccgataatcatgtcggttacaacgagcgagatcccatccgtggggacgacagctggaagagcttccacgaaataatgtgtttggccaaggaacgggacgtcgatatggttctcctggctggagacttgttccatgagaataagccgtcgcgaaaatccatgtaccaggtcatgcggtcgattcgcatgaactgtttcggagacaagccgtgtgagctggagatgctcagcgatgcaagtgagaatttccagggggcattcaatcatgtcaactacgaggacctggatatcaacgtggcgattcctatcttctccatccacgggaatcacgacgacccctcgggagagggtcatctggccgcactagatttactgcaagtgtccggccttctcaactactacggccggactccggagtcagataacatccaaatcaagcctgtcttgctacagaaaggccggacaaagctcgcgctatacggaatgagtaacgttcgagacgagcgactgttccgtacctttcgcgatggcaaggttaaattcttccaaccgtctgtgcagaaaagtgactggttcaatttgatgtctgtgcatcagaaccatcatgcccatacagaaactagttacctaccagagaactttctgcccgaatttcttgatttggtcgtctggggtcacgaacatgaatgcctgattgatcctaggctcaatccagagactaaatttcatgttatgcaaccaggatcctctgtcgcaacatccttggtacccggggaggctgttccaaagcaaatctctattttgagcataacgggccgagaatttaaaaacgaacctatccgattgaagacggtgcgaccatttgtgatgcgggaaattatattatccgaagaaaaaagagcccaaaagcttgcgcgcaaggagaataaccgcacagaagtaactcggttcctcatgtccattgttgaagagctgattgaagaagccaatgcagaatggctagagatgcaaggggatcgcatcgatgaggatgaggatggcacatcggaggctccgcttcctctcgttcgcctccgcgtggaaacttctacgcctgaaggaggtagctacgattgtgaaaacccacaacgattttccaatcgcttcattggtaaggtcgctaacgtgaacgatgtggtgcaattctaccgcaagaaaaaagctgcttctacttcgcgcaaagatgataaatctgttgatgaatctaccatttctcatctatcagctcttgacactgtgcaagtcgaacagctagtgcgcgagtttctctcatcacagtcattaagcatcctgccgcagaattctttcggagatgctgttgcccaattcattgacaaggatgataagcatgcaatggagatgttcgtcaatgaatccctcgagagccaggtcaaacacctgttggccttggatcgtgaggaggacgagatggatgacgaggagagagaacaaagctcgctagtgactgctatggagaaatatcgcagtcagatggaaaccatgttttcaaagggcgtgaagaagcgaactcgcggaaagaagcgcttcaagcccaagccagatggttgggattccgagtttgatggcgtgtgggaagatcagcctggtgcacttattcattctgacaacgaaggcggggatccagcagaggaagaggctggagaagatgggacagtgcccgctcgtggtcgtgccgcggctcccactcggggtcgtggtaggggtcgtggtcgaggtgcagcggccagtgcgcgaaccaccaagaccaaagctattccagaaaaaacgaccacgaagggtcgcagaaagcaagccatctcagacgaagaatcagacgtgattatgctggatgatgatgacgacgatgttatagccgatgtcatttccgatgatgatgatgatgattcgcaggcactgttcgttaagcagcctcgatctactactaccgcgaagccacgaaaagctgcccctgcgaaaactacgacccagcgtcgcggtggacatgctgctgcctcgccagctccgtcatcggttactgttggcgggactgcttctcggcgagcccctgcgcgtggtaagacagctcagtctacgctcaacttctccgcttcccaggccagcgcacctcagtcatcacgacctagccgctccacccgtaacatgagtgtcatcagcgatggtattgatgacgatgacgatgacgatgacgcctttgaagaaatgccgaccaactcgaggcgtcttaagtaatttgcgatttaccgccatggatgtttcctttatgcatgtatggagttatcaagaatcactcgagcgttaccatcagcgttgttgccttcaatccttcaatgatatcctcaaaatacggttctcaaatgtcagatgatacaataaattataatcaatcaacaagagacagtacttgaagttgtgacctttggagatgaagtataccgacaagctagtctcaacacggtaattagcttaaatcgcaggaacttgggctcttgtccctaccgctcagacccagaggcttcgataagccaatgaccgaacgagatcacttttggggggcagaatgtgattcagattcccccttacttcgtcaaacacaccagagacaacgtagatctctttgtcatttgttctatcaaccccgcattcccagccgaggggcacaaccacctcggtgcaacacaagctcaatcctctattgcatcatatattatcctacctctgtgttcaaggatacaagacaatactggttaacgcacaatggcatacaaaggtcgacccgttcgcattgcaggttagtttacttgcactcatgatgtactccagctaacctgttaggtgcctcgggctctgcctcagaccggcggcaagctatcgctgattttgcacgtcaccacccgaccgatcctatcgatgtcatcattgccgatttcatgagcgagttcaacatggccactgccgccggtcggcgtgtggaccagacgacttcccgagtaccaacagccccggcctacgagccctcttttctagaagcacttgagccggctctggatgatctggccaagtatggaatcaagctcgcggtcaatgctggagtgactgacacgaagggtctctacgaggtggtgctgcgtatggttgaggcaaagaatctggacttgaaggtcagtcggcgccttacccaaaattaatcaacaattgctgatttgggtgtgcaggttgcatgggtttccggagatgaagtactatctaccgtccagaaggaattggcttccgggtctgagtttcgcaacgtctacacaggcgatcgattggcagattggccattcgagccaatatatgcccagtgctatcttggcggcctcgggatcgcgggtgcgctcgcaggtggtgcggacattgtattatgtgggcgggtctcggatgcttcacctgttatcggagctgcttactggtatcatggctggcagcgtgacgagcttgacaaactggcgaatgcgttcgtggcaggccatctgattgagtgcagcaattatgtctgcggtggcaatttcacaggcttcaaagccctagaatacgcagacggggatggctggaccaatatcggatatcccatcgccgagatatctgccgaaggtgacgttgtgatcaccaagcaggcgcatgccaccggtggtgcggtaaccgtcgatacttgtacatcccaattgctctatgagatacaaggaccttggtactacaactctgatgtcactgcggtcctcgataatatacgctttttgcagtgcggcgtcaatcgtgtcgctgttcatggggtccattgcggccctcctccgcccaccaccaaggttggcatcactgcgcgaggagggttccaggctgaggtatggtggtttctcaccggtctggatatcgaagccaaagctcgcatgctggaggcacaagtccggcacttgttgtcaccctattcgggcagatatacgtcactcaatttcgatttactgggctcttccctctccgacccacccaaccagaaccgcgctaccgtgccgttgcgcatcgtcgcacaggcacgacatgcagaggaccttgcaccgacacgcttcctcaaacatatcaccgataacatcatgcagggctatcctggtgctacctttcacttagatatgcgccaaggattcccacgtgccattttcgagtactatgtcaccttgctgccacaatcagcagtccaacaccgcgtccatatgccctggaagccgacggcatctgcgcagaccctggatatttcgcctccggcaaacactaggatatatccatcacgccaaccctcgcagccgaccgcgcgcaccgacagacccgtcgaccttgcccgagactttgagccgacgagtcgcggcccgctaggctggatcgttcatgcacgctctggagataagggtaccgacgctaactgcggcttctgggtgcgtcacagtgacgaatacgaatggctgcaggcgttgctgtctgttgataaggtgcaagagctgttaggagagactgcccgcgagaacacgaacttggagattgagcgcttcgagctacctcgtcttcatgccgtgcatttcctgtttcgcaatctactagaccggggcgttggtgtgaccaccaccgtcgatttcctgggaaagaatgtggcggaatatctgcgggctaggcatgttgatctccctgtgcgattcttgaaccgcggaaagctatagaatggagttcgctgtctcattcacgggcgactaagtatgccaccggggcataaccatcgttggttaatattgccgatccatgaccaggagacttggatttacataggataaaggcgctatcccatcgtgtacggagtatcttcggggacaccgaaggacagataacatagtggaaatcaaattgatcaataaatactcaagaatgagaacaaatatccccaaacaccgtgctatcaattgcttctgtcaaactaggtagtagggaggtcttaatccagatcagatgcagttgaacgctggggttcatctatatcattgaggtcttgatgctgggaaggccctagaaagaataatccagccagacagagcccagaaaatgcggccaagccatagtatgggagcccaaaccaaatccctctgagcttcataccctgcgaaaaaagccatgccaatgtcgacccggcaaacatagacccgaatgtttcaaagatcccaatcatcgcattcatcttcgacttatcatgtgctcccatgtagctcatagctattgatcgacatatcgcattcaagcccgcgcctgatgtctgaagtattaatccgaaaatcacaaggccaatgcgcggagcccctgtaagaaaactcccaaaaatcgccaagcaagccgaggcgcgtccaagaattgacagctggccgcaagtattttgaaagtagctttgatatcccagggaataagacaagtaaaatgagcgaacttgaatcatcgcacttcctcccgacaagaagaagatacataaggataagagaaaagtcgcaaggcgcggtttctggacaggggacggagtgaagctggactccaacagcggggcgttctcgttccccctgtcatgattctctatacgcatggtttatcgaaataaaagaaagccaccaagtggctatgaaaattcaatttgaaaggtttggaaaaggtaagtacaacattttggaaactgttgccattgaaggggcgacagggccttggcgatgacaactttcgcgtttcaaattacgacattgcgataaagaagcacccagaccagagcactatgttgtagattttagtcctaattagagatatcatctattctgctgtctcaaagactcatttgactgcaaggctccccgggtattttgtaacctctggcgtcggatttgttagttatgagagccttaggttgagtctaactgcatcgacgagggtcctttaccactcaaagtaactaacagaggaccatacaccttttaagttgaatgacaagacgttttagccatcttagctatctgcgaactttttctacgacatccaaatatatatatccacgcgatatgacctcctctccgccccttaaactgagtaagttgcgagattattggaacatacacgatacatgcagatgcacctctgtcttgctaggaagcaaatcaatcgtctttttggatgttgcatctcaccagtcaatttcagtctccgcccctgagggccgattgtaacgcgggacccacaagggccgccgcgggccggggacccgcattttggatccgctatctggtatgtacattgtacagtgtacaatgtgcagtaacatcgtacaagaacatgtagagatctcgggagatggcagatcaggtgatctctgaatggtacagttgcaagtcatgtgatcagtattgagaatactgttactatagtaatttacataagctggttgaaggcctaaagtagtttagcagggattgtgtaaaggttgtgtaacccttctctttccctatcacctacacccacttggcatctgctttaccacgaaggaaacgctatttcgtatcaatcgaagatggcagaaactgcatcagcgaatgtgaaaactagattcctggttttttccgacacacatgggcttgatactccaccaaactttgtctcgcgccattatgcggatgtcgcaattcactgcggagatctcgctaccgaatcgaaaatcgatgagtacaaagcttcgatccgtttcctccaagccgtgaatgccccgcttaaacttgtgatcgccggtaatcatgacttcactctggacactccaatgttccagaaaaaggtcgcggaagcccaacccttagatcctcaactagttcaaaaagtctacggcaactatgaagaagctcgagggttattcgagaaagaaacaggtatcacttttctagatgaaggtatccattcctttcgcttacaaaatggtgctctattgaatgtttatgctagcccgtataccccatcacttggggattgggggtttcaatatcaccccgagcgcggacatgactttcgaattgagaatgtcgatgtcgtgatgacacatgggccgccaaagggaattatggattacacacactctggccagcgtgccggctgcccacatcttttcaaggctgtagctcgagcccaacctcgacccctgatgcattgttttggtcatatccacgaaggatggggtgccaagattgttcgatggcgtcagaaagttagcctggagccttctcacttgactgatatcgacaacgaaaagtcagtcctcgtatcccgactctctaccatcaagggtaaagggaaccccacagagtgctctactacaagtaattgctctgaggatcacaatccactgcaacggggctctgaaacactttttatcaacgccgcgattgagggctacgaagatccttcgatacagccaccgtggcttgtcgagctcgagcttccagcagcggcgtgagaacctaaacttaccgtcgcgcttgtagtaatgaattaggcagtgttcttggttcttgtcatgttctattcacaatttgtgctaggtatatggttaatgtcatcgcatggtaagtaattttcactagcccaagggcaattgctccatctaagaatacatttacaaaataatcgacctcccgtcctcctcctgtaataatgagtataataataggcaatccacaacccctaggcgtctcccagctccgcgcatatactctagttcttcgacattgagcctggaaggattttccctgcctttaccaacaccgacaacagccatcgaaagtctgcaacctcaccatcactcccacgttcagccaccgtcacggccctcaatctcagcaagtccgacatggatgcaacagagccctcgaaaaagggatctgccacgtggatgcgttcgatggcgtcttcgatttcgataatgtcgattcggacgcgtattccttgactatcatcgaatataatcttgccgtcgggctcgagagaaaagttgggggcaccgtccatcactctcttagtgatgtcatgaatgacatcgctcggtgcagcaacatccacatcctctgtatagaatacagggtcgtgggcaatgctggcagcgccgccaactagaatgagttgacgacgaagttcaggacggactaggcgggtggctgctcggaagcactcgatgagtgcctctcgtagtggtgcagggatgggggtgcacttcggcatgtttcgaagttacggggcaaaggcagctgggcagggcctctgaatacatttagcacatccattctgttgccacatactgcgcctgcgaagtgatgagcttactggagtatatgcagcggggagctgggaggcccgggggtacagtggattgccttcacctccatgtcagtagaagctcacattgtagtctgatgctcaaactcacggccaaaagatgatatatccaataagcatgtatctatacaatgtccgactttgtggatgtgtataatggcgattatttgataatacaacaagcttgcagcgccaaatactcattttgaccgcagtacttgccattctcacctcattcccagttgtgcctttcttttccctcacttcacataatctttacttgctgcggttaccacctgccttcaccgagcttttgggatgcagtagcttttcaagattaaggaaagagctacgcacattcaccgaaaccgcatactgacatacatgtaaacacaagcagtcaattccaaccactagctatgaacaccaccgagccacagccagcttttcctcttgcttattgcaggtgcttttgcattatcaacgagagcttctgctccgttcctccaatgatatcgaaataactatattgtaccgattgcttaatcaatgggtgtgctccgaattcgccgagaactcaatgaaacaaaacaatacccaatcagcaccatatggcggctagtctatgcatttagaacagagcatcgtgatgaaattataataacaaagtccgtaatatcattttatagaaagactcggtatccagactacgcgctgtatccctagtagtcgccatgcactgcgatatacgggctccgagtatctctgttcgacagtctatcataacaaaatatgctttacgggttaatctcgaaaaagtggagttaccacggataattgatggataattgcattgaacactatgcctttgaaatggcaataggcaagaaaagaaaagccggagatcgctcagggagctagggcagtagccttgatgcgagcctcaaagcaaaatccaaaaggatctcagtacccaccagccagagaaccacccagctttatccgtttcacaacagtctattagattgcaagtcgctccaccttggctctaaggtgttcgatctgtggagctaggtcaccagcatcgttcgaggtgatggtagccgcgataatcggccgggtcacgccgcatgctcgaccaagagcgtgcttgttaggcagaaaaacgtacgggacgttcttgtcttcgcaaagcacagggacatgcatcaatatcgcgagaggatcggtgtcggcggcgagaacgactatttcagatgtgcctcgactcagggacttcgtgactagacaggcaggcaggcattagctccatagttagctcaaagtattgtgaattgtgaacagacataccttcatttgcgccttttttgacctgcttgtattgcatgccttgctgcaacaagtccaagagttcctgtgtcaaagcaggatccgcgaccggccacgctgggaattggttggattggagaatcaaaatgaaaaacccgacgcagacttacggacacactgtggggacgattccatttttctagagggtcgctgtgcacctcagaaggggagtgagagacaggaaagccaatctcgttggggagattggttggcgaagttggaaacaatgttgagaaagtgagtcgtttgcagagcaagtaggtagagcgcggtatgaaactgcgaagagaagagacgaaagagagggagagacaccacctatgagcactttccttaaacgaaagattgtcggccacgtcaatagatcattatactgtacatcattacccagacatcttgagactcgaatatcaccgaagttatacacggaaaaagagttaactggttatatttttcatggattgaacttgaaaccaaagatctttatatgaattcaatgttcttctaaacataatgacaacgctatgcaaacaacgctctgaaacgaacattggaagtctctatacacttacactggtcatggtagccgagggtaagagaggacgcagaaaggctactgcatcaaatattcacattcctatccgctcacgagaggatcaggcgtaatgttggtggcagtgatagcagcagcctcggctggcgtgatggtgccctcagagggagtatcagtctctttgggcgtattattctctacgttctcattcttaacgggaggctttgtgcccttttcacgcatcgctccactttcaaatgcttcttcgggcagaggacggacatggggctgacagatccaccaaggccttccgtactccgcaatcactgctttagatcccttcaaagtctcatcgggttgtgcttcaaacttctcgggagaggcttcgtactcctgaagtccacctttaatggcctcttcgaggagggccaaggtgtgctcaaaagcggccatgtcgcctggtttcgatgtcgcaagagcatcccgaacgttggtatgggttccaaccattggccgcaagacttggaagagatgaccctgcatgaaaccgaggctggcagagtgacacttcttgcccttctcggccttactccgcttttgctttttcttgagcgggccctcctcgtggccgttattttcggcatcattgatttctgcaaactcatcaactgggtcggatggaagataaagtggcttcctttctggaaccggctgttcgagaacgtatttatagatgatatcaaggtatcttcgcagcacggcgtcaactcggtaaccgccctttccatcccgcccgcgccagtattctctcccttcagtgccggctgggggtggcttgctgaatatggacgggtctgataggtttccttcggcgctcatcacagcgtcggcaccggtcgcctcgagacaggtttcgatgtcaccgtagttaagaatgtttccattggcaaaaattaccgtatccgctggtagattgtctcgtaaatagcggatatagctccagtctgcaactcctgtattgtgacccttttgttcccgtctgcgtccatgcacagtgatgatgctggccccagcggagagaatcatcttagcatactccaaggtcttctccttggtctcctggatacggaatttcaccgtgacaggaatcgggagttcagtgtgcaaccgatgcacaagcttatagatcaagtcccagtcctcctggaggaaagctccgtagtgtccctttttcgcgataccctgcgggcagccaaggttcaagtccacggcgtcgcaatgaggtgccacatgacgggcagcctccaagaactcatctgggttgtttgtgcaaaattgaacgaaaagtggccggtcaattgcgggatttccgtcaagaaacaattcatccttgttctctcctttgcgggtaggttggaaatgtttggcccggacgttctcttgttcgccgaaaagacgtgcgtgaaacattggggtgtatgcgagtaacggtttcgggtcgtttggtggcatgaatgatcgagtaagcatgcgccacgcctttgggaagcattaacgtcggtctgcagatgttgctacttggaaggcggactcacgaattcggatctgtcgaccattggagcaacaacatattttgggctgccaatgctttcataaaacttccttccaaagagcttctccttaggctcacgcgcagccgcagagggctgctcaatgctctttggtgggcttgtttcggaggccatttttgagagattggactgggaaaaatgtctagaaaatcggcccaccaaagagttgaaaggcttgaagatacctatgttgatgcctggaaggaggaaaatgtggttatggtcaacgatcgcctccagtcgcatcacaatggagaaacaacttttgcgaaaagcgccgtatctcagccggaattactatttcccggcttatcttatcgtcgcgggggcgattggaagctgcgaacgcgttgagcttgtggtgtcactggggaaattgactttacatctgatgttttcgacagtaccttggcatattcctttccttctcatacgcctcacaagcaacctgatcaacctcaactgcctaggtgatcccttcaagatcggactcgcttgtggattacataatctgatatgaataccccggcgccagccagagactaaccaaggaagtctcgaagtcttttagtgagaacgggaaccgaaaaatatacattttttgatgcatatatgcgatgctgtgtgaaagggaattaatattgtgaagcgagtgtgttgatacacggaatttgacatagttctttcttgatcgctcactgttctgatctctcgcctgccaacaatggacgcgtcaacaggatcaggaggtaagtccatagtccacataatcttctgtccaagtaactctgacagcgtgctaggtcctctaaatctctgcttgtctgaagatggactatatgccgcccacgtgagtggaaagggcctgattgttcactctgatgtagcttcggaaaataaggaagtgcagatcgcaaggatcaaagagattccacttaaatcacttaaatacttcaacgtggaaagttctcgaacatcagatgatgaggttgtctctcgacgactcctgtctgcaaacgacaacagaatctcggtctggcagttcaccccccttgaaatattggccgagattgaaaacatcgaaccgggctcattagctgttgattttggcgctgatgagaatgaagttctggtgtttcatgcgtggaacactaaactcagtgtccattcattagagaccgggcgcagctcagtcattaaaacaccaaaattcgcccatcacctcggttttggttatcgcccaagaactaggcacctcgccattctgttaaaaccggagacttcagatctactgaccgtccacgagccccggtcctacgagctcgtcaacaggaccgtgctttcaaccattgatgcgcaagggttgaaatggagccccgatgggaaatggattgccatctgggatatcgctagtgcaggcacaaaggtactggtattcacagcggacggtcagcttttcagaacgtattccggaccatctggggtggacgattccttcgatctcggagtaaaacagattgaatggagcccggctcccaataagggcgtttctggaatattggccgtgggaaaggtcaatgggaatattgacttactccggactcgcacagtaagttgttttccaaatatgtgcggcattatttgctaatcctattgtggcagttctcctccgcaacaacactctctcatgtcttccaaactgaccagcaatgtctcaatatctggcgtgagcgatacaccagtgccgcaggggacgctgaatatgccgaggcatcctgctcatctgcattgagcatgagccccgagtcggcagggccaccacggggcgtcttgacaatgaccttcagcccagacggccatctccttgcgactgttgacactgcacggcagaatgtcgtttggatttggtcactagagggcaccccgacacttgtatcagctctcgttcatgaacaacccgttcgacagattgtatggcacccttcgacaccacaactcttgattaacactattacgaatacattgcctgctattcgatggtggtctccaagcggtcatccattgattgcccgggttcctatccagaggaacgagagtggaaaatatgatgtgagatgggttgcagggacaaatccaaactcgccgttctggttcagctcaccagagcaacatgttattggatatttgtctacccttgacggtgctgttgaatttgaggtgttgaactcggtgagcagcaaaagtttgtcatgattgagaatgagtgtgtattcgagaggaaaaggggctctcaataagtcaagtgcctctaatcactggaatgaactggttatcggacttgatagtatagaactcacattcggtgctgtcacttagatctgtgatcaaacagaacataggataataccgaggccgcgactttgttataccaagacatagcataaacatggggattctgaggttatatagcctggtcaatcgctagacaaatagaggaccttgtcctgaaaggaactaaataactatttgcactatctagctgtttcacttggtcatggtgcaataccttgtcgtctgagcaatgggcgaaaaatgaagcatatgatttactctggctaacaagtcgacaagttaaaaaaatataacaaaatcaaaagtaaaactccgatagggggaatcgaacccccggctgccgtgtgagagacggcgatgttagccactacaccatatcggatgaggactgcgaattactctcttaggtttagctttgaccttttgggtttagctttgaccttttgggtttagcgctctttgtccgtgtgcgttcccgtgcgtggttctataaagtcctccctatcgccccttcaacttttcgctgtatttctcccgcccgctttttctttctcctcgtcttcgtccgtgctctgcaggtgaggcatttctgctattgatccggatcactgagctcctaacctccgctacccccttatccctcgacttgactcatcggctattctgcgctcgtacgaatgcaatctacgttgcccgccctgtctttctcagctccgaccggtacgctcaagataagaccgcctttacccttatggcgcgacgccgaccggcagacaccgaccggcaggcttaccgcccgggatatcaatcggctgtaattggcttctgtgtaagcaagcgcagtcgccttaactatattcttctataaaagcgtcgcaagactgaacttcgggccaaaacgttcggcagcaagttttttatgattgtggaagcacttttccattattacggtcatcgctagtgaggtctgctgccgatagcgcctagatatcgccttaatgcagttgcccctcagagctctcctacagttcccgatcatctgttgataatatcgtcctgtatcgcgaaatggcaccgaccacgagatcagcggctaggaaggcttttactacgtcgaccttgactcctccagccttgaaaatatcagaggttctagaaatgattctgcttcagataaatatacgtactcttctgacatcttacctacgccgctgggatatgcagtcaacattgggtgggcttcgagtcatctcccgaactagttgtagctttttaaagacacatattagcttgcttaaagacaacagcttcacaaagacaccagcaaccaaggaaaactataagcgagaacatgcacgaaaatcaaggatcatcgaaggtgatcgaattcttcgaatttattcgctcgtcatgctttttttctcaggccaattcatttacaggttcaaacaccatatatggaacctcacgacttccctagaggacctccgagttgcgggtattggtattagctaagaaataacacacattccattctacgagagcttggctatatctgccatagaccagagtgaattcagacgttgggcgactgatggggatgccagaatccgacccgaatcttgttcatttcattcgaatgcaacaggaaatatgcattgtgcgacaaataaggattctcgaggcccaataaccaaatgataaacttaatgaggcccatgtcgtactcatcttggtttgttcgtttcagttttcgttgagctctaacgctcaccatttatcccggcgtacccttgtcatgttcgcagtacattagcaaaatatttctatataatgaatcgtcggacttggatttctatctcctctatttgagaaaccgaatctcattcctatactgcaagtggtccatttatctttttattttctagggaatgtcgcctgattaggtgctttcccagaggccctggcgttagcccccgagttttcagtccctatataatcaactgtccgtcggtcgttcgtaatccgttatcgatgtgcctcccgctctctttatatagtcacctacgcgagagggtctacgaaccgtaaaatacaaagaatggtctgatagggccttgctatggttgagtgatagcgcctgctttgtttacgctatgaccggaatataacgtggcttatttgaccaatcgaactgccctagccgcgagccagaggatgctaagtccgcaaacattgcggcacgaacggctagcccctaatttcgtgatgtcctcatagtacgagctcataggcccagattgcaaatgcgataccgtccatccctcctccaattcttccggcattatgaaaactgctttgccgcggaatattgcttgttggaggccaaaacaacggtatatttcagcttgaacatttcggctgtgcacggttagcactcaggtcgtgctcactaatcacgcaggcggatatccatagataacgactattcctgcaaccgcacaaaacgtgctccgctgccagcttacttcgttgcccagtcacggaaacccctgcatatgtgactgatgcatagtgtggatgatgcctagcctggcgctaatgcaaagtatacacatgtgatggattagtctctgtggcttgagttttataatctacctgtttattcacaatataatttacagcgtatcgagaaatatatttttatcgcatatatagtgaagcggatactgcaaccttagaatactctatacctcgttccctagctttcaagtccaactgctatacaccttcgtaccaactgccaccttatatctgatctctcttcacctgcgcatccatagctggcttatggtgttgctttcaggggggtactaggaagatgccataattttcatacttcaatgttctgatgctcggtatcttgagttattttactaaggtatctagagctttgactccttctatggttctttggataacaaatacagcgtttaattgagtgaatggctctgtctcaagatagtaacttcagaatttcgggcctccatatagggcagcaaaaagaaaagcaagggcaaaggtccagcttcacaaaaactcaattcagtccataaaggccggctcgtctgagtctgagtcagaggcctcctcctcctcttcattatcatcacctggaggttctttgattgacacaatcatggcctgataaatatcctctgccacaatgatccccctcgtagcttcatcagtcccaggagtgctttcgaaatcctcaaaggttctttcctgcaccaaacagtctggtagcttgtggccggagatacttctcgataatatctttaacatagacttgcagagatattcgccgggtgttggccagaatagtctgatgttttcaactttttcggtaaagttgagattgccttccttcttgcagtgtatgtaggtaataatgaatcgaaaatataagtacctcttagctggccgtgcatcgctaagaaactttaattctcttccgtccaggtcctagagagaggttagctaattgcccaggctcattgaaagaaatattagcttacattccatgtagtgcatgtcgccttggtgctgtcttcggttggaaagcgcttcataactgttgtgtgtcgcattgcttcgtgggctaacacacacttccaacgcgaaggtgtcgtgacatcttcgtcttcgaggataggcacgatgactatcttgccgctatcaagggcttcttcgaccttgtagtgaagtgacagggctggatattaggttagtggtagaatcattatcgcggggggcacaaactcaccattcctcggatcagaagatacaatggcccccaccccaaataggtgagcaatctcatctcctcgaaggctctttggcacaaggtgggctgctttgatcgatttggcatcagtggatccaatcacgtggcagtgtccctcaaattcatccttagggatatcataatataaacaaacgtctctcttgaagttagaggcattgaagcttcgcccatactcatccctctctttcggtaccttcgcgccggcggacaacacctttgggcaaatagttgcggtatatgctctttccagaaattcgacgtcaagttctccttgtcgctgacgcttcacgggcggtagctcttcgagatcatcttgtatggctttgcgttgattcgaaaggaacttcaagtgatcagaagtacgtcgggcggatgtcatgagtggttttaacgcggtgataaattccgaggtggttatcttttcattgtcgagggcttcaagaagaccatcgtgagcacaagagatgtaatcgagatccattcggtagtctcgaatcttgccctccaggaactcggacacagatcttgtggtcgtcatctctctcgcctgcttcctgagaagagcccgctggcgatccagtggcataatagcgaatgcgttacgagggatatctggccgacggaacattttgctgtgtgatgagattcggtgaaactccagaggatgtattggaaccgaagcccaaagagaaagggctgagatagagatgaaattcaaactccaaaggaggttgaataagcgaaccgaggattggatccgaactccaaagagaacgggtgaccgaagtcgaaatagagaaccaatccctaaaggagaatggacaggtgaaccacggattcaagccgatttctaaaggaaaacgagagacagggattgaaacgagaccgatctctaaaggagaacgggaagaagagccaaggatcgaagccgatcttcaaagcagaacggggggcaaagatctaccgtcgctttcagtgttcagggcaaacggcagacggggcttgatgattatgcagttgatagattgtgcggatgaggatttgcttgaaggaaaagtcattcaggggggaagttgacgggtctcatctactcaaaggcggaaggaaccagactgatggtaatccacggtatgtaccttaggtaggtactgtaatagggaaaccgcgccacatcctgatgtgcgccaaaatgtccagaatggtagatttagcccccgatcacatagcatagagcatcaagcgtcctacatctctctcaaaaggattgtctatttcctattccggtcgtacaggggccctgtgtccttcctcatactccccgtcgtgcactgaacatccccgtcgtcttgtctgcgatgtcagaccgccgtcgcgctcttcctacttcactaggtaggtctcggcattcacgatttcccgaacgtttcctggcaaatagaaagtgatcatacttcgacatcgacagatgttctactccgcggctggttcttacggttggaaatctctatctcatacaagtggatctttcctccggcgtgcagcttatcagattatcatcagattatcatagtataccagaatcaagcaaaggaatgaaattaggtatataagaatattctctaaagagcggcaacccctccccccccaaaaaaagaaaacacaatagtacacaagaaaagcaaatattctgtcttcagtatgaggcagattctgtggtgctggaccttttctggggagaaagcgatttgtgggctcggcgaccaaccgacctcaaccattcacgccctctacgttggacttctgggctggcaaaaacgcgctgctggtggaaggcctgggcattttgcatgaactcttggatggcattgatgataccattgggctcatgctcgggcttattggcctccagcaacactgctaccaaatacttgaaagggcgcatgaagggcgggccctgatcggataggcgggagaaattgaaacagaggttgaatggcaaggctactgccatccatcgttggtcgaactcggactctgacatcgaggtcttcacctgaaattcaaccccctaggactgccaatcctatatgatgcacatctcgtttctgggcatcggaagctcatatatcgcaataagaaaatcggcgaggagtgccgcctcctacctgaaacgaatcatggagtagatcttagcctcggactcggggaatatgcctaactggtagaatctgaaaagagtacctccctaagccaccgctcggcctcgattccaatcccctcgataagtggcatggaacatcctcgccatctccttgattctgtactgcgcaatgagagcggttatgttctcgatgatctcgctgtccctagttgtgcggactccgccgactttgtttgggtcgctgactgtgaatgtggcatttccgggatcttggtttcgaagtgcgcgtatatcttccggcccagtgtacggatagggcttcatttgtttccaccgacactcaaagtgggctagcgggatgccggttcggcccgtccatgagtattcccatctatcatcctgggcactgaacgtgaaacactgcctgttgcctagccgtgtcacgctattttggcatgtatccaggacagattggcagaatgagttatagcttagggtttgctgatcattcggctcctcgggttgtaaactcagctggtcactagaattgctagattctcgagcatctaatagaggactcgtagcactcgaaagggtctggaattgggtgctcgcaaaaattgactcacaagtccgaccgacacttagtgaagcaccccacgcattagaaagtcctttgtgaagttcttcgtccggattagtatggagcccaccagctgctgtcatgctagtaatgtttaattccggagtcgtagcccatcctcccgagtaataagcggtagtaaccaaggtaacgcgggcaccgggttcaaggacggctttcagggcgaggatactgagtccctttgattcattgctatcgttcaaacagaggtggtaattggggagtccgtgacaaaatatgaggaggagtggggcgtcggttcgtttagctaagtcagaggctagcattgcctccagaaggaaacggtcaatcatttcattcgaccgaacgacagtcacaggggtcagttgatcttgatccagtatgtcacgatcaaggcaagttttgcgctcctcgtaaggattgctatgtagatatggcccatatttctggatcagcgcttgtcagccacgtctgcttctggccttgacctttgaggagatagttgaaggtgtagaagtcggagataaaccacccgtctcgcaatgggtgggcactgttgatagaagggtgcgttgtggcgaggatgatggtgttctcgtaaacacaaggtaccgttgaagaggtgaatgttgcaggcaggtcacttggggatcgcatatgtcctcctttgacgaggggctgttgctgtgttgagcctgccattgtaaagtgatgtcgaaagatatgcctatggtgaagttaggatcttatcactgagggtttcaaatacccaaattctagcatagcactagccacatcggggctttacttacttttcgagttctaccacccaagtaagaacgggcggcaaccagggaagaaaaccggactccaaaggagaacggcggtagacagggattgagatcgtcaaggagaagaaagactcggcaccatcgatagcttaggtcagctactcctgttggaagtaaaaatacgttataatacaccgtacttagcttagctaagaaggtgtgcacctttttggcgtagcggtcaagtacaggcgttttgttacgttgacaactctagcactggacgtccaccttttttgggacaggaacgataccggttgccactctgcattgaatcctttaaggcttgaagctcttggatcctttggtcatgcccatgaactaccgcgattgccgattcccgcgctaggatctcctgctcgagtgcctcctcgatctcgcagagggtactgggtggtgtgagatcaattgattggctcactgcggtatagctcgaagggggtcgggtcgtgaaactgcatttttttttccttttccctaatggcaattggtacaacccggtatcgagtggtgtagcccgacggcaacgacataggaagtgaaaggcccttgtaatagttcacacgaatcacattccacgttaacaggaatttgagtccccgttgactggaccgccgaaagcttcaattttggcagtcttggtcccgactgtatagtagaagtctgctctgcgtacgtacccctggttcatggtaaggtatgcggctctgtagtgtgtggagcagagtgtctaattattgacgaacctgtctcccacgagtctattggtgctgtagcgcagttcgcgcctaatatgcaggctggtcctggtcatctgtgattagcggggctgggtgtgtgttgggaaatgactccatttggaagggcgaagagtattctttgcggtccggctggataagtgagtaactaaacgcaaatggagatggtgaagaaaggtgtcatgtgtattgaagatcatgtggattgaagagtccaggggaacctcagcaaccttgatcatttcagaacttccgtcacatttcctctcttctcttcccctcttgtctcctagcatccttcaccatcccatccgcagcttttcatccactatccgttggtttttcatcaataattcgtcgccaacctctcttatcctgcaaagtctattggccttttggtctttggttctcctattatagccatatcagcatcatccccgcccgcgagtcaagacatattcaagtgcgatcggatactggaacccgcataagattcatagtgactatccagataacccttgacaaacgggccaatggctaatacgatacaagtttcaaggttcccctgccaagatggcgggacactacactgtaggcgcgccgatgaatgtcctatctgccgaagccggagcataactcattgagcctggtgtatgggcaacatacgcaaagcagcttccctggaaggtggcacggaccggtcaactcctcaaaacgacgcggtcaaattcctcaagaacgcagacaatctccacgagcctatgcaacgttccactaccaattatacgggtaaacggttggacgagaggatcagttctgaatccttgaaccttgagtcggtcttggtacagatcgtcggcacgttatctccctcatgaatgccagtcctgtctgaagcgtcacgggccatggggctcactgtatccggtacatggacgccgaggacagaatagggacggtatgtggaaaatgtcagtggaactgtaaagattgtcgatgcaagtcctcccagccccctctcggaggcgagatgtcacaaaaagttcaccgacgaggacgttcctctacatcttccctgggctcgcgacttggcatctcaattcacagcgcgttgttggcgacggaacggaacatcgcattggtgggactccaacacgcaggctgtgcagaacacttgttttggtgtaattcagactttgaagtagcgggaggagtgctttccgcacggcctcaaatgagataatgactggcatgatgttctgccgtcgtagctgtttgggaagtagggacatgtgaatgtgtccacggtagcgagttcttctttctcactccatgtatgatgtcccttccttgatggaactatcaatgtgacccattggattgagtttgtaaattaacagagaagataacgaggaaggagcaaaacaagacgtatgataaagaggaggataggagggatggcaggaaagggattaggaaacagattaagaaagaggactagcaagagagactaagagggcaggtgctctctgtgttctcagattgcacctcaagtctgatatcaagtcttcatacgaccgagaactatgcgatgagacgaaagtatgtctaaaacaaagcatgttttaagcttgaatgtcgaggacttgattgagagtaccgagaaccaggagagtgagagctagatataccgtatatacatactacttctagattctgagtacgggctcactcccactcacgacaaccgacgtggaaaatatcatgtctgattagagcatctgatcaaccaaatcaaagaagagagagagaattctggccactctgacgaggcaacgcccatcatctttgaaatacttcagaggtcgttctgacgaagaaagcaaacatgaagggggataagactagaactcttcaatgggctaggttggtcctcgaatataggcccagagcccaactgtcaatgggcttcgggctattttatccatagccagcccagcccgccgcccattgtcaggaacgtctgacatgtgcaaggtcaggtgtagggcagggcagagggacacatagtgcaggtgcagctgcagctgctatacttctcactgctcttcctttcttctcttcttcttcttccttctctagcttagtgttttcgtataaagaacacaaagttcctttttttctatgattgttttgccgagtctaacatcatgttttgctctctttaattttattagctgaaatgctgtgtagacatagatactactgtttatatctctagtattagcctgaactacaaattagaatcaagaaagaagaccctgaattacaaactattataaataattaaagacagacttcgaattctactaatagtataagagtagacctcgacaagtcccatgggactaaaaagattttggtcccaactcctggaccgtgctatatggaaagaccacgattttaatgcttaaaaccacatgaaatcatggcatttccgttgtcaccttgacttacaccatatcggatattggatgaaggaagatatattattggctatatgaaccagcgacggaatagcttcatttttgaactggtctataattcaggcatattaaggcatcaacctgaaaaaccagacatttaccctcggccgctctgccccttcgtagttgaatagatatttgactatcgcgattttattttcgttttcaattttagaattagtgagtttcgattatttgtggggttataccatgtttatgcgatccattacgttgatcttccgtcatccatgttgttggtataaacaggatctcacatcatgccaagattcatacaatataactgtacaaggactccggaatagtgatgtttgaaacttgattcctcggcctagtccggtcattatcagtcagaatgatgatcccgtcatacttctggatttagctttactttatacgcttgtgtgtatatccaaccatataccgataggttttttacgacaaagtaattgaataataatttacaggaccaatcctaatgatcctacgatataagcgacagagacattattattttgctgagcgaagtaaacgcgcttgaccatctcttcagtgcttaggtatcactgtcggggttcttacatcatcgagccctgggaacaagattcggagcatgatttgaaagagagggcagttttagaacgaatattcaatattttccggtttcctggcatggataaacgtcacattgaccggatcgaaatttcatagtctattttataaactcagccgccaatctgaccttcagtttgatctattttctctccacctcccacctctcaatcactgggatattaataacattgcgacctataacaacacgtgaaacacgactttccagcatgcaacaggaagtggaaaagccttcccggggccctcaatctcaattccaaaagggtaagctcatttacaattctgtctcattgtttcgggcttaacaaggaattcaggtcaccaaatccctattgagcaccacaaaaagcccggcttacaggctgagatggaagacccaaatcccacctcaagccaacttccaaccgaggatggcgggtatcagacctacaaagccgcaaggaagcttgccgggaaaaaggccattatcacaggtggtgattcaggcattggtcgtgcagttgctattctattcgctatggagggagcctcgagtctaatcacttaccttcccgaggaagaaacagacgcacaagagactaaaaagcgagtagaggaaatcgggcaaagctgttattgctaccccactgaccttcgggataagaagaattgccaagcagtggttgatacagccctcaaaagctttggtggtatcgacatcctggttaacaacgctgggactcaaacgatgatcgacgatatcaaggatctagaagagcatgtatcttccgtcttatatcattaagtgtttttactaacatacgttcacaggtctcaatgggaaaccaccttcgacaccaatatccaccccgtcttctatctttcgaaatatacaattcctcatctgaaaagcggctcgaccataatcaactgtgcatcggttaaccactacattggtcgccctgatctactcgactacacgtcaacaaagggcgcaatcgtcgctttcactaggggtttatccaaccagcaagtcaaaaacggcattcgggtgaattgcgtgtgtcctgggccaggtaaatcgaatctcccacagaaatatttccgcaacagctaatctgggtatagtttggacacctcttattccagcaactatgactaccgccgcagaggaggagttcagcggcacaccgatgggtcgcccaggacaacccagtgaggttgccacatgtttcgttttccttgcgagccaggatagtagctttatctctgggcagagtctgcaccccaacgggggagtagttgtcaacggatgaacggtagatagaggctggcgtcaattaatatctgaatttcaatccggagcctcgaacgggcatgacatagttcgtattttggttgcgtgatgtcgtgaagggagatggatcaaaaaaagatattatttatagcatatttcgtttcgataagtaaactagtactagtccgttcagacaaatgatagccccaaaaattctatcatatagcgccgggcatacataagtggctacctcagattagctcaattttattggattctataactgcagtcttgtcgccttacttcacagagactgttggaatgataggcacatcagcacattcgacttgaacaacatgatgctcaaacctcccgtcagaagccccaattacaaccgcacttaattgatggccgtataaacacgccgagtccagtccaattgcataactgcttagctgcaactggcgctttgcatcatgcccgaatatcaccatagtcttggatgctagcctatcttggcaccggttccattccataacccagctttcttctccgggaagttcagccggtacgaatacatcctcgtcacctgatttacggataaggctccgcatatgcattacagcgtgtggatcctggtcttcaagtgggatgccaggaacgaggccagcatgtacgacaattagagtgtcaccgaagcaggatgttaggacatgaggtagcttgacgcgcaatatcaatggcaaagtggcaagccagtcgagatgacgcgtcgaaagtaccgaggccgtactgtgcgatgtggcaggtacgcatttgtcggcgatctcacaatctcggatattatttccgggtagctccgcgtcgggattttcaggtacgaccggatcgtcagccacgcccctagagtgcagtagcgtatcccttgtggcgttgaccttgatctccgcagccgcattaagaactgcattttcgtggttgcctctcacggcgctagcgccaagcttcatggccagatcaacaacaccaggactatcggggcctttattgacgaggtcgccaactagtatcagatgatctcccttgtgtttgtcgaaatcgaccttgtctaagagtgcctcaagggactttttcatcccgtgcacatcgcctacaatgatcaaacggccactgacagaaccattttcagatgatgggagaggttgcagaataaggttggtcggcaggtctgaaataaaggttgtgattgggaatatcttgtcggaagattttgtggccattattgtagacctgaagcataagaaagaagacagagacattaaggcccgtccacgggtctgtgtgttttatttacataataacccaatatagactagcgtagcttagtgtacatgtcaccaagatatatattcagaacaaattcatagagtcactggagtatgtcggcaacagaggaagtgtttccccacgaagcttggagggaaatgagtcagtttctcctgtgtgaaagaattttcacctccgtggatcacattaattacatgaacctcggtagaagacaagaatataatgaaagagaataagagaatatgttgttaggccataataatatactatggatagtaatgtatggatagaaatctcatgggagaaaaggttagaagaattcccgtcagatcatgagaatggaaatgggaagaggtctggtcctatgggtcccaatttggcgagatccagctacgaataagaagaagggagcttcagttggcaaacaaaagagtgtatggagttagatacatgcatagaagataataattattgcgatacactgagtagtcaaaaaaacaaaaaagacacctttgctcaaatgtaaatctgttcttcgatctagatcaagaacaaacattcacttcgaggaatttgcaaatctatcgaagatagatttagtttccctggggggcgggcttgccatctttgacatccttgggattcttgccatccttggggggaggggggacctggtcccgcttgccgctgtccttgatgtctttggggtgcttagcatccttgggaggagggggaacctggtcccgcttgccgctgtccttgatgtctttggggtgcttggcgtccttgggaggagggggaacttggtcccgcttgtcattgtcattgtcgccatgagccgggggcagagcaacttcagctgcagtaggctccgggagggggttgccctggacatcggtagggcctgaaaatagtgttaataaaactctcagcctaggaatgggttacatgtgccggtgtacatacgctcattggggggagcaccggcaacgaggccagcggccatcagagtagcgagaatagaggtgaccttcatattggcagttggagatttgttgtagaaagaaaggattgaaagtgtctttggtttggaagtgtttggaagtgtttggatgagagtgatgatgaatggaagacagtgtccaggaccgcctctttatacctttaaactcgagggaacccccttaatgttttgactgagctcaactttgtcacgacattggaggaaggaataacgatcggattgacgcgtcatggtcgtcaaggctggtctggaatatgattctattaaaaaagccaaaagcgaatactgcagtagcttggcctaggctgcaactacttctggttagacttggatcttgagatccgtagtttgtctctagagctttatgtggcctccttttatggggtccaaagaagggatataacagacctcaggctctggtattatacggtgtatacagagtgcatatagaattactctacgaggccatagtgaatatggaagcttttcataacagagaattgagatcatagaatgtctctgaatcaataatgttaatctcattactccgtactggtcgatgttctaagttgaggtttgagatcgaggatgatcaccatcgggtaagctccccgaagccctaagagaaagaatgaggcaactatggagcaacatggctgatccctagctaatgcgcctatttttaagaattttacatcatccatcttattcaagtttcattggacaatcgaagagctttctccagggctgagatgatgtgttccccacgtacacgcggcctccgcaaatcccagccacgcttcactcctcagtgctccatcgaacttgtcatttcacataccacattgaatttatggttcttcgtagctcaacgtatccgaaaaccatagctcttttaccctcagtttgaagctctgtatgagcaaatccatgagaaaggctacgttgcttgctgtattattcggaagcccctgagcctcatttccatagatggagacggtgagtatgttgacatggctgacagatgttgagatccaaatgcttccccacaggcccggctccattgaaatcgaattagggttgaccaaatttagaactgccgaatttccgaatttccgcttattacgcaatgatcgcccaaaatgatcgccatggctttttctccattgttcagaaccatctgcttccggttagccaatcaaggtccagagattcatggtggggcgggagatcgacgagcttatacgtacacagtttgacgcaattacctatgatgggacgaacgtatgggtaacgcaaaaggggcttgcttagttgactgtcggtgatttacttctgcttctcattcgctccccgtaaatgcttgttttctccaagcattgctgcctaatccatcaccactctagaagtcttgctgttggatgttaagccaaattttctgctaaatcaatgttttgcatgagcgcttctatgtaaaccacaaaaccaattccaaggggtgaacattaattccacaggtttcattgacccggaacgaaaattttgataccatcacgcatatgctcaaaattgcgcaggcaactcttcactctcccctttcaaattcccccttaccgcggtgaacctgggccctcctaaatgtagttctagaccacgtatggtatgcttgcactattggccctagaccttgggacattctcagtcaggaaaaagacttcatccttactccacttaactgaatcgaggctagcaccatgctcagtcctcacattttcgtacaaactaaaagcctacaagtacaaagtcgattttttcgttgttcgtagtgtcaaaatgagtatggctattgtgtcatcgcctatcccacgtcacatcagagtctagtctgacatttttggtagatgatctactaaacatggcacccacatgacccatacccatactcagaaatacacagctctttacatttctctcatgttgccaacatatctttactggatgatgctcctcgagtcttccaagaacggctctcggcaagtttggttatatgacgatctggaaggcgaccgcacctgccctacctgcacctgcctttctgtatctcccagttatggaagtaaccgctcctttcatgaacgtaagcgaaagcaagcgggctaaattcgtcatttgcgtggtttgttgaaagctctcgcacaaaaccatgagatcaggaccgataaatagttttctccttcctttcctttcctttctatacttagtattccgcctgaataaagactttcttcttacaaagcctggtccgtgacaggttacgtttataaaacaaaactcctgtgaaggggcaaggtcatctgcatgtcgtatttcctgccactaataccaaggaggaagtggagaagcttacagagacgattcgtaagtaggcgcaagagctgcttgatatcgaataaacgtggtggtagaatacccactgctgtatggcaggtggaagctcagtaggccgtagcggaagtgaatggaaatcgcgtatgaacctaggaaaacatcacagcttttccaactatctaggaaagtcattatttggtgaagactacgctgctttttagataaatggaaaagaaggcgcaacctttaaattcattgctttggacatgattcccgttcaacgttgaagagataaaaaatatattgttcattcagtaacgaagacataatttctttctattattaagaaccttcactatattccagccgagagacttgtaaattgctctgtattcactcattccgtaaatcaaattctagagttgctatcggcatcgaagatggccactgcatttgcgggaatgaaaggaacatgcagcaagcatgcaacgtgactacaagggcttcaggtttcgagtcggttgtgcaggtcggtaattttataatatagagcgaatttataatattgcttgggaccatgggtttggtaccagcacctcggcacgtagttttgatcaacaacactcacagtttcttcccttcttctgaacattcacatcaataatctagcctgacacagttcaaatgcagtgagcattcccagctgcagcgtaccttttgtgtccacattggcaacaggctaatgaccccacgtaagtttgaaatctctctgtgtagaataagcttcagaagatatatatattccccgacccaccagcatgatcatcgagccccatttgtgacattgtgtagattccatcttgaaaggatctaagtcataaagctatttaaagacactgaatcgaaaaagaacataagataaccacacactctatggtactttttatctctgccttagcgtactttagttattgttggacatagtggtcacctgaccatcagcccggtgcggcaggcaccaacccccataactagatagtcgggcattctgcccctttaggccacattggcaacaggctaatgaccccacgtaagtttgaaatctctctgtgtagaataagcttcagaagatatatatattccccgacccaccagcatgatcatcgagccccatttgtgacattgtgtagattccatcttgaaaggatctaagtcataaagctatttaaagacactgaatcgaaaaagaacataagataaccacacactctatggtactttttatctctgccttagcgtactttagttattgttggacatagtggtcacctgaccatcagcccggtgcggcaggcaccaacccccataactagatagtcgggcattctgccctttaggaattgacaactctctccctctatcattttccatcactacactgtagtcgcatcagttatccatccatggctcacatgaccgcttagtcatcccgctctctgtcgatctcccgaatctctccaaagtccacttcccatccactcaaactcttttcctgtttggacccccatctggatgcttgcagggagataacgcagcagtgcataacgacaaggactatatcgcgccatttcttatcgcgtgaattggtggatgtaacaatgggagacacccctggagattgattacaaatccacctcattaccaatcacttcgaacagcccttgactatgtgtacatttgtagcctttttctctcaaagggagaacttcgagtatcagccttcgatttatccaaaagaataatacccgaagaatttcctcaccaatagaaaccacaccaccaaacacgaaagaatgctccgaccagtcatcttcaggagatgatctcaaagctccgtctcagtcccagtatctagcacaatctcaatcccaatctgaatgtgactgtacagagaaaatacatgcatcggatatgttgccaccaaccgaccccgaaacagggcaacggaaccggaagccaaaacctctggcattctatcttgcatttatagctttgctattgatggtcttcttggtgtccctggatgccaccatgttggccgttgcaatcccggtaattcgataacaactccttcaattcaaacggccattgagttcacctaacccttcctctctataggccatcaccgatgaacttttcggcacgaccttgaccgcgttttgggccaacatctccttcacagtagcaatcgtggttatccagcccatctataccagtttctcagatatctgcggtcgtaagatccctctttacgcggcttttgcccttttcggtattggatcgattgtcttgccgtcgcgaaaaacatggcagttctgattgtgggacgtgttctacaaggactgggcggaggcggactcgacgtcctaagtgaggtcattgtcgccgatatcactactctgcaagagagggctgtgtatattgggttactgtcgcttccaatggcgacagggtgcatcgcgggtcctattctcggtgcagtctttagtgagtttgttacgtggagatggatcggctggattaatctgcctatagtcggcattgccctcttcctggctattttctttatgcgcctaagaccaattgaccagtcccttcgctcccagcttgggcgtatcgactggcttggaatgctactatttacggccggttgtgttctgttcgccctaccactcagttgggctgggaatatgtacacctggggatcgtttcgaacgattgttccgcttatcattggtgttttgattttggtgggatttgcattttacgagggttatcagaccgacgctgtcttccgctaccgttccagaacggcacaaatgtctctgcttggaagcttcatccatggcttcgtgctttatactcttctgcaatatcttccactgtttttccaagcggtctacctcgaatcaccgttgaaatcttagatctcaatcttaccattctgctgtgtggtatttgtctttaccggaattgccgccttcgccgttgacttctttcggagatacatatgggagatttgggctggatgggttttcctcgccgttggctgtggtatcttctcactgtgggatcgatcttcttcagtagccatgactgctggcttccaggtgattgcggggatcggcattggcacaatcttcagcgtccctcccatcccaatgcaagccagcgctgcacccgatgaccagggtctcgcaatgggaataatggtcgcgttcaggctattcggtgctcttattggtcttgcagttgatgccactacattcagcagtgtcttcgccaacaggattagcggtatcgatttacctgcttctttggcattgttgaaagacccagtgaggccgtaagcttcattccctatttacgaacagccgatatctctcctgatctgcgggacctcattcgaggttcatataaggacgccatgcagacaatctggtatgaagtggccgcttttggagcattgggtttcttgagctctctattcgtggaggaattgactatggagacggaagagttgggtcggcagcatttcgagcatgagtcagaatgaattgaaatccacttttggaagattagatggtagagcgggtgaacctgaggtggatgtggaaacgggaattgccctgggaagtgtaaccaaaggggcatagcgcgttttatcaaattgtggccttaatgcctgaaattcggcctgagtttcgaccgcttttaggcatctatttacagccggcacggaataaccagtcccgatgaccccgtgaatataaagcttttggcggcatcctttttttcagggcatgaagcaatttaaattaattctagcaccacgaatgagagagataattcaatttcgaaaacggaaatttaatgcaagatggtggattatggctaattgactaaatacgacccgtacggagtacttaatgccagttatggtacggggtagattcatgtggaatggaactctcttcatattgccagatcaggtgatctttgaatagcttcatagagatcttaatatgcaacaccaacagtttgcccagtctttctattatacgaattgcaggaaccgtaatagtcaaaccaagttgacatatagctatgacttccttcgaaacgctcaggtccagtgtcatatccagggatcacaacaccaccattcaatctctattttcgaatcgctgacgagattaccctggggtgggaatgtcgcccctatcatctgccagacaatcgggttgcaaaggcctggaactttgcgttgaatgatctgaggtttccgtacgctaatgattgttttgtgatacttccaagctggctgcccgccgcgtctatctagcctcggctctgaaatagtgggttttaatgactcacaaaaggcatggttagttaggtcagaaatacacatactttcaagaataaaatcttctttgcctattcctatgattcccaggtcttttatgtcagaaatggaggtggtagcggcaaagaattgacccgagccaacttagaggtctagttagataggaaatataaaattcgcatgttttcattgcaataacactggcttcgatcgatggagtgcactatatattttctttcatatcttaaccctttgttctagtctagtatgctcatatctgcatcctccctgccttttttccaattggtgatgatgttctgagtagctacttatttcgcacgtttttcgactagttgaagatcccaagtcgctaccagtgcgtgcgtcgagcgatatctgggccacagcgcgataccatacttcgaggcaaatgatagcgggcaaaacatgcagattcaagtaacgcagcgtctatatgttaagtaaaagtgcccaagttccccacccatgcgtagaaaccggatatgtaccaccttttacgcagatgaagatattttgtattggacttattgacatagtgcataatgcatgacctgtactgtggagtactggaggttgacgacggtctacattgtctatgacgaagtagatccttataagtaagcagcttgatcgacaggatctgcagtttagtgcgctagtcttcagcccagccacgaattccacacactctatccagccgagacacaaggtctagtggcgatatatctactccgaagtagttcataccgcacggaacggaccggctcgagcgggagattcaaaaatatcttccatattgacgtgactgtgcatgacttgctgtatgacccatcatactttcattcgttgtttatgtaggtcgcagtttgtttcgggcaaaccgggatcatcagtgtggttacgactccattagaaggctgatcgattccttatccgtagggtccagaggcaaagcgacttacatgtatagtgtgggtcgctgctgatgaaagccattggcctgagaggagggaagcttcacccattagtgagaggggtattgttggaatcgccagttatgaaaaggaagagtggtataagtatctggttatcccccgacgagttgatggtctgacagacatctcgagaaaggaagaaggacacaaggaaaacaccaatatgaatgaaccacgcaaagaaaacaatccccacaatgtcatcagctcgtacttcatcggacctaaatccgaaaatatgggcaacttccgagccaacattacagcgatcctagatcaaatcgaaaagacacgttctgattaccaacccgatgatgatgtgtgttccaacaccccataatagcacaatgcagatgaaagacgggtatagaaactgacaataacaggtctttatcaccgaggatgttcgaacctctccggagttccaacaaatcacccaaaatttccatgaagcagtcaagaaagctgtctcactcttgggaaaacattccattccattttggcatcctcgctatgagggtcacatgtgtacggacatgactatgccggggctactgggttatttcatgacgatgatctacaatcccaacaatgtcaccgtggaggctagtccgttcacgaccgtcatcgagctccgggctggaaagcagctatgcgatatgtttggatacaataccgattctaaaaaattggaaatgccgctgtcctggggccatatcacttgcgatggaacagtggctaatttggaatcgatctgggttggtaagcatacctactcactgtgatgccaaagactcggggattgaccaatgtacagctcggaatctgaagttctaccccctcacactctaccaagccatgaaggaaggtagccttggcttcattgctgatagcttctacgtcaccacttgtgtgggagaggagaagcttttcagggatctagggaactgggaacttttgaatcttcgatcggaggtcatcttgggtatgggagatgctctgtatcggcaatatggtatcacgtccaagttcctagagaatgccttgacaccgttcagcattcaaaccacagggaaggatgttttggagcgcgaattcaacattaccaagcccaccaagtacttcctggcccagacgagacactactcgtggcctaaaggcggaggtaattcttaacttttctgccctagagtgaccgattactgataaatccctagcgatcgccggaattggttcggccaatatgcagggtgtggagctagacatggacgggcatatctccatcgaagcgctggagcgagagctcgatcgatgtgtgaccgagcgtcaagccgtatacgccgtagtggccatcatcggatccacggaagaaggtgaagtggatccgttgtatgacattttggcaatgagacgtcgatttcaagacaaggggctgtcattcctggtgcacgccgatgcagcctggggcggatattttgccagcatgattccacgattttatatggccccgggaagagcaacgaagaggaaggatggagacaatgccgtcatcaacgttccttcgttgaccctgaaacccgataccgtcaagcatatgattgcactcaaagaggcagactctatcacggttgatccacacaaggcgggttatatcccctaccctgcgggcagtctctgctatcgggacggtcgcatgcgattcttggttacctggactagtccatacctcactcagggatcaatggaaaacatcggcgtatatggtgttgagggaagtaagcccggtgctgctgcgatggctgcatggctctcaaatcagactatcggattggatccaagaggatacgggatgctgttgggcgaagcagcctttaccagtgcacgggtaggattcccctttctgtctgtattacgatccgctttctaacccctgatagctatcggccttctacgcagctatgcacctaaagcaacccaaggaagatggcaaatcctactatgtcatcgttccattcaaccgactgccgatcgagaaagagggatacgacatcctgtcagaagaagcagaccaccggcgtgaacttatttgggaacatgttctgacgaaagataacgccaaagtcagcagcaacccccgcgcgatgaaatggcttcgggaaatcggctcagatctgaacatcaacgcattcgccctaaactggtaccatgccgatgggaccatcaacaccgaccttgaggaagcgaattacctgatgagacgagtagtcaaccgactatcgatcacaaggagtgacaaagaccccagtaaaatccccctcttcttgacctccacgcaattcgagcccgcattatatggcaaatgtgcgcagaacttcatgaaacgactacacctcgagccctgtgcacaagatctctgggttctgcgcaacgttgtaatgagtccgtttccgacagaacgtggcttcattcatcagctgatggagaaactggaggagaccattattgatgaagtcaagaactcatgccgcccgcgaaatagtcctacggcaaatactatcgagttcctattacgaggaacggatgaagtgttcctggagttccagacaaaattccatcgcgcaacccagcgtcaacagatcatcttggcggtggaactacggaaagatgtcaaaagtcaatacatcgcactgcgagaaaaattcccctgtgaagacatcggattcgcgtcgaatggtccgattcatctcgaaagcttaatgcttcaaatcaaggacgcgacccactctcgtccacaaatcgagggtgagatcggcctcgttgaagcaggatactactcacacacgatccgatgcaacgtgacgatgaaccgagtggtgaagagtcggggattgaactccaatttccgagacgatcattacccccgtaacttcatgccattctatctcttcggcacgaaagaacaacaccatatcacgcacatgctcctccaagcgccgaacatcaatctttcatctagtaacatccagctggacaaggagctccatgacaaagtagcgcctcgcctcggagagggagaaggtctcatcctagcgttgaccgattaccgcgaggaaacgatgcacccattcccgctagataacaatgaccgcgcgatcaatagcaagggattcttcttccgaagaggtcaaaccttcaacgtaaaggtgtatgttgaccccaagctggctacagccaatggacctgggttactggatgaattgtgcacgctggtcggccgtggtaaaatgacactcggggatgatgtgcatgtggacgtgactgtgttgaatgctgatccgtttgaggatgaggagccggatattcagtgggaagaggaattggaccatatcaccaacgtgttgaatagtggccagtagagcgatagattcctgggatgccggaggaattacaattgccaccgtgccatagagtggtcatccacgtctaaatataatatctcttggcgccaaaagcttcatgttcatggggtcgtcgggcccggttattccgtcccggaataatttacgtaaagcgatgctcccagttagttcaggccaactatcaggcattaaggcctcaatcaggcgaaaatgcgcgctattcagcaatgctaattgttactgagcctgtgccagaaacaaaatctacttgcaggccttataaatgtggcgagagctgagccctgtcatgccagaatactcatcgaaaacattagaaattcacgtaaattcatcgatcctcaatctaacctggtatatcccaaatgtaagtctatatccacgggcctgggaaaacctttctatatacaaaacccaaacacctaagccttgagagtatacacaacacgaccacgtgagtctgtacccttgagcacaatctcatcgccagtgctggagacaacacggcgctgatccccgttatgtagaacaatatctaaatccttccaagcaggagtaaagccagcctcgtcacgctcaaacttaacaagtaccttctcctcggttgagctgtaggtaatcgtgtatgcagcagtgccgggttggacggagataccatcatcttcataccaagtggtagcaaagacagtaccgtgcgaagttcccttgggcgggaacacttccacaccacggtaatcgtcgacatcttggacggccactgatgcagcagtctcatcgccaggaacacgggtgtgcacgctcttgccgacagggatggcaccgccgacacgggcaatgaggggaatgctcttctgccattccgacgagatcttggcccactgtccagatgcgaggtactggtacggagcgttcatgttgacgtagccatagtcaaagacgctgccggactttcggggcaggtagacgttcgcgacatcgataccggctttgtagacgccaccaacgagcacggtctcaccgaaccagaactgttcctcgcctgacttgagtgcttttgtccacacctcgggatcagactcgtaaccccaaccggtccagcgctgtggcggtgttgcgaatttgtggctctccagaccgagagagtagatgtagggcagcatttcgtaacgacgcttgatggtggcgcggacctgaggtgtgatctcagggtacataaagggctcgatgacatcgccgacgtcagagtccttgggagaagtcttgaagcagttgattgcgaagcggggagcgtggcagcctatttgaatccagcggaggaggagctccggggagggctgggggccttcgaatccaccaatgtcgtgtccttcgcattggagaagggacatgccggcgtttagagacagggcgttggcacccttcatgttttcccagcttgtaacgttgtcgccgctccaggaggatgcggcgtaacggagggttgatttttattatacgatctaagacaaggcgcacctttggcaagtggatcgggctaccttgttcgatgcagtgcagtcctcgttaagggaagccctatctgccagcaacgtgtacaacaacgaatacggacttttaagagatcagtataagcatttttatttcttagagattggagttagaaggataaggccgttttgggaagcatgctgaaaatctgctccgatggagatttgaggcgcacggaaaccaagctctgactctaattgtggctcgtattttggcccccaacctactattcgggtgtggatctagcgcagctcgcactagactccacaatacgcccagcatcaccaggcctcggtcttgagttggcctgtcaatcctgggatggcctgtgctttcagtggttagaattggggtttgcaattgagcaaggtgcatagccaccgtcgctccgaaagttcgctatcttgagggtagatcccaaggaaagaaattgagagcttgaggcataatggaaaaagccaggaacgattgtttcggtctcgcctgaaaaagatctcggtcctcttgtatacctctccgctatcttgcagtcgattgaatactagttaccacataacttgcccgaaggtggagagcaatttccacattatccctatcgaggaaaccgccaactagctgttcgtggaatcacggaaatctggccgctggattagtgtatcacaagatacttgtctcagtctgaactgattttttgcctattgccacttttcgagtgaagagccaaaataacgtagaacataatcgcaaatgcaacagatgaagcgaagttgatatcttacagctgcgtatttcgtataacttcatatctaaatccaatccttcacattcctggccctaacgtaggagtacttattatttcgctggctaaatcctcggaggcttatgctccaattccgggagaggagacttcgatatcaatttattttagtggatatatgctactttcttagcggcattagtttgtcgcttacgctctaccaagaggagaagtcgtggatataaaaggcgttcaagatcctcccaaagctgatgaaaacgtccttcaaaattagagaccctttcctttgagacaagcatatcacttctccctcggcgaatccttcgtccttgttttagtgtacttttcttcatcatgaagcttccaattcccattgctttcgctaccctcttggcctttgcccaagctgctccatcgggccccggagaatctcgcttggaagcacgagcttctgtcaacgactgcggagactcgaccttcataaatcaaagcagtggtggttctccacttgtggctgactgccagcatcttgctaggaatattgctggcggcggcacctggagagtcactgccaccggcggccagcaccagctagctcagtatggcacctgcgcttttggtatccaaggccacaaagacatggatactgcacacgttggcaatcaggacattatcgacctcatcaactcttccatcgccaagttcaactggaacggaaaagtcggtgcgaagggcgatatgttatgtcagggcgagaaggggctcatgggtaagcccaagatgacgtggggtatctatcatacttgagctatagcagtgcgatcgatggcaggtttatttgtaagttgctctgggatctcatgtgtcctatatacggagaattgggcgctaatcacatcttgaaggcatttcatgatcgagacaagcatattattgtgtcacatgcattttcaggccatgccatgctcagttcagtgtacttaaatagtggaaatatcggagggactgtctgattcaatctatcttacgtatattcgaaactgcgccttaccgtagaaatgtggttattacagatcttagacacttgttgcatgttgactgaaatgcggcatagttttatcacgtgtatccaatcttgtcttatttggctgttcatgatattgagtgtggcacaaaaaacataccgctccggaaagctcgtttcggtaatacacccctaacataatcgcgccggctataacgccctttttaccacagtcgcaagaagttgctcgctaaagtcgcccagctcgaaaggttgagagaacaccacccaatcagcacctacttcgaggtgccattaccagccctcgtcgccctcaaaaaagccatgttcaagcttgaaaacatttggaccctatcccacaaagggtgaggtgaatgaaacgtttgaaatcgcgacagctccccgtatttagataaaagattgttagagtagtctatagatacttttccacttagactaaatatcatatctagctattttagggggtttggagaactttgctaatttgatgactgattagggcgatgtaattcccagtaccacaataacgcaagttttcgatttcttcgaaataggtatagtatactaaaaattcttatcgatacctctctgacaataatggattagatcaagttgtggtggttgacgtacaacgctatattctatcgcatttacgatgtgtttcgcagatgtcggtcgcctggagtgggtggcttggcttggctgtcttgggtggcgctgcgggtcaggacgaagggacgcagcttgggctccatgtcctgcagggcatcgtgggaagatttgcccatcaactcggtatggagggcacgaccccaaagaccgacggagttcttgacgtctttcgctgcggcatcggcgacagtgggctcattgagggacatggtccaatcatcgtcgggtagggtgtattcgttgttgtcgttccacataccatcaatgccaaccttttggagactctggacaccgtcgtaccaccacttgaaggcctccgctgaggtgaagtctatgtgggcaccatcgccaccggtggcaccgccagcactccacagacgcatgtatccaggctggttttcggcatccttaaagaagccaccggcatcaacaagcttctggaagtcggggtgagaagccaacaggaaaggcttaatgttggtgagaagtcggataccgtactggtgcattttggcaatccagtcctggggatccgggaagcgttctcggttccatgtaaagacattgcgaaccttgggctcggtctcagcaatggaatagcccgaactcatctggtgagccgagcagggaattccatgttgcttaagcttctccgcaaactccagaagggccaaatgagccttctgcggctcatctagcatggtgtacttgtagccaccggagatatagccgtaagcccagcgggggaccagaatggggaagccaaccaactcggcatacgagcggacaacatccttgatggtcttgccaacaatgtagtattgctcaataccgccatggtcctggcggtacaccttgaagtgtccccagagcccatcgatctcggctcccacagaccacagaccgcggctatgggtggtcgagaagatggccacacatccctctgcagaagccttgatcagaagcgggatgtgcttgtagaggggatccgtattgtatacatcatatccaaaagagtcggtggccgatagttggaattgacgaccagtcaaatccatgggagctgccttctcgccgagtccgacatggaggcattcgcggtcatgaactgaatagttggcgacaccctcgccgtctacaatgtatgatcgcagcgacaaatccttgtgcagaggcttttcggagccgatccatgacagtttgaccacaggggtgtattcccagtctatggaagcagtgacaccggcgacatcgattgttttggaggagggaccctccttggtgaagacattggcgccctggaggttgatctcgggcttggtgacactcggatagggagggatagggtgctctgtggaggcgaaagtggctcggaatagattgggacgaatagcttcaaaagtgaaatcaaaagcactcttgctctttgtgctgcttcggaggtggacggaagcttcttgatcagtggcttgtggcacttgcgaatagcccttggggcagacttctctttgaggcatgatgaatgtgaaagacaatgcaattgattcggaggaactggagagaataccaggatatgccctgacatagtggtgtatttgaatgctagtcgagctcccctcagtcccatcgtttcatgtaccccacggtggtacgaatgatgcattgtagctgtgtagaatcggaatccggagataatccccgagaagcggagacgcgacggttgagtgggaaaggaagggcaggttccgggattaattttgccgcaaacctccgcatttcccccacaaagaacgtccggggaggccccacattagtttttctctcggctttgcgcaccgaaacccgatattaacgattttcggcacttctcatgactcctcttcctccatcgcccctcccatagaatttgcctcagggaagtgattggataatacatcccgacgtcggccgcgtgtatcgtgtcttgccgtttctctccaggtcaactgaccgcgtggactatacaaatttttatcgccaactatgccaagggctaaaaaggaagaaaactatgttgtacgtggtgtgacacttcgggtttggctctcttctccggggaatgtaatatagttccttccccacggggttgtgcatacaggctgtactacatatatctcaggtttacgtattttgtcttcccctattcagcttgattcattgtctttttatacctacttggtcttttattatttcccaccgtgtctctgcgagtgattagctatgtcgcaggagtcaacttcacaggcaaagaaccagcgggaggagttcgtggagaccattgaccccgagctgtcacaagctgtgcctcctcaaaataatggcacaggaagtcagcccaaaggagatcatgctttgcaacttattgaagaggcagggcactcaaccatcctaacccctgagaacaacgccaaagttcttcgaaagatcgatttgcgtgtgcttcccattctccttggaatctacttccttcagcaactcgataagtcaaccatctcgtacgcctcggtgttcggaatcgttgagaaagcccatctccatggccagcaatactcttggctggggggttcgatctatctggcgcagctggtgttccaacccctggttgcctatgttctggttaaagtgcccctaggaaagtttctggccgtgtcctgcctgctatggggtattgctttaacatgcatgactgcagctacaacctttggagagctgcttgcttgccgaatcttccttggtatctttgaagctggaattggttcgttgtctcctgataatacctagccatccctactaacgatgagctttatcagcacccgcgtttattgcagtcactcaaatgtggtaccggcgtcgtgagcagcctgtgaggttgagttcgtggtatgcgatgaacggaatcgtgaatatggtgagttccctcccatattgtcctcgtgacacttatattaacgctgaaggaaagtttggaagcttgattgcctttggactaggtcacatcaattcctctatatttgcgccttaccaggtgagctataatacataattgcctgtcgaggtattaacatctaacaccgactagatcatcttcctctttttcggcctagttacggttgggttctctgctgttgtcctgtaagttttgaccatgttccccttttcgccgtattatactaagataatcttgcttagtgttttcatgcccgattcccccgtgtccgccaagttcctcggagaggaggacaaacttctatctattgaaagacaacgaatgaatcaacagggtgttgagagccaagagtggaaatgggaccacgcaaaagaagcaatcctcgatcccaagtcatggttctggtttgcgttaatgttctctatttcgtgagtgagctcaaatcgtacaaatcactgcactaagattgctaaccactcatcagtgttccaagtggcggcatcactactttcgggcccttgattatcaaatcctttggcctcagccaatatgatactatgcttttcaacattcccttcggtgcagtgcagcttgtcgccacaatgggaggagcttggctagcaaccatttggaaaatgaagagtccagtcttggcattgctctgtctcccacccatcgcgggttgtgtgatgctattacagattacgcacgacaatgcccacaaagggcctctacttgcaggatactatattgtaagtgttgaattgaaacgaaacatcactgtggaatgaagctaatcgatttcatctagatctctgtgtacccggccatcagtaagcgtttacctcattccgggatttaagcccagctaaccatctctagcacctttaatatactcttggtctgcaggaaacacagcaggagaaacaaaaaaaaaggttacaaccgctatcctgtatgtcgggcagtgcgctggtaatgtatgtaacactgtaagccgtcacatcgggttttcgtgctgacatatgtcttacctaggtccttggaccgaacctatataccacaaatgaagcaccgctttatcgacgtggtctgctttctaagtaagtttatcaacgcacaagtttttgtgcgtcaaatatctaacgcacgcccagtctcgcgatgttttgtgtcttgataggtctcaccgggtaggttttaaccaacttcgagtgatcattctttctaattacgaattattagggcaaacaccacatatctgtacttcctgaacaagcagcatgggaagagacgtgtggctctcggcaaggacgctaagattgtagaccagtcgatgcaagccattcaagctgtctccgacgatgccaaggaggatttgcctcaacaagcagcaaatgacaatgcctggaaagatctcactgacttgcaaaatgaggactttgtctatgtcttctaaggtggcaagtttaattagtctgtgttatagtgggaacatctgatttcgcattatttgatatagcacctttgtattgattaaatgtaaattggaatataatatgtttataattacagtcaaaagcaagaaccaccaaagtctccttaaattagagcttttcctttgctgaactatttcgttgtgggacctggttgattgtatagccggctcggagaaaaacccgaaccccgcgtttctccaggttttccccttcccgtcaaccccgacaatcatcagtgcgagcagaagacggctggctctacatggctgatcagtctgaatgtagcccgtacagtacggtgatagaggatgaatccttgcaccttattccagcgccaacggggaaaaaacgcattccggtacgtcgctattcggattaggaccccacaacagcggacgaagcctaacaatgcatggcgtttttggtgcatagaaagcctgcagtgcttgtcgacaatcgaaggtcagtgcccaggcctcccgagcctgcatattgtggggttttgactgatcctttcaaggtaaaatgcgacggagagagaccatgtacaaggtggttatattccagatttacatgaagcttaaagcttatcctgataaatcagatgtcaaaaattagaaaagcaatgcgtgttcttcgaaataccgaaagaccccgtctcagagtacgaagtgtcctaaggtgttatcaaccaagactaacatcatccaggcggatcgaaggcgtcgagtccgaagttcaatatctccgaaaacagctagatcagatgcgcgagttgtttcaacagagccgttcacagcccaccccaaagtcccaactaacacactccccaagccacctctgtgataggcaacaggatgtgcctcgcgagagcgcttgtggctctcgttttcctcattcacaggatcaccccgaaggtttattcccacatatacctgtcactggctccgctaggtatacaaattgccaccaataccaaaggtctatgtcggggaccatacaaacgctctctccaaatgagacatcgactcagcctccctacgcgcgcagtcagataattactagaccacccaaaagaaaacggtctgggtttgagattcgagatgagcctattgcggactttattgataaaggcctcatcacgcttgaatgtgctgtttcatacttcaatacgtatgtatgatccgggagttattcggggattaattatgttttactgacttgagagatttcagcttctttgcaggatgtgtatgtatcaacccttattgccatactttaaatcctcatgtttcgtgaattatacaggacaggtatatcccgatcttcgaccctcaatacgacacctttgactcggtccgatctcgaagtagtatccttctcaacgcaatttgtaccattggctgcatggtcgaaactagtgaatgcccacccctggtatattttgtacagtactattgtactaaacagtttcttccaggatctggaggtggttcaatgtccgacgttctccacgccgaactcaagaaatggatcaacgtcataatccagaacaaacaattaaactgccgagaatcaattcaagcaatgctcgtagttgcttgttattccgcagaacgctcactaatcttatcctttgccactcgcatggccctggatctggaattggatgaggcctttgatgaattaacccggcggcttgctcttcagaacgaagatatggcttacgccttgccacatcaaatgtttgaagaggagagagcccttatgtggaatgctcggacgtggttcgggcttttggttctcgagcatatgtaagatgagcttggcttatttttatgggttactaggctaatcatatgcaatgtagattccgacttgacggaggaaaaccacctggcattcggctaaaggggaactcccgccgctgtcgggttttacttagccatccatggtcgactattttggatttacgtttgttctctcaggttgaggtatgtggggtatctaaaacagacttgaagaagtattaatctttcttagttaaatattctcagaggtatgacctttcggtggatttagatgcaatgactaatttaccttctatagccaatgtcggtgatgccctaggaggaaacacatcgctcgatgggcaaagcatcgcggattacgtgcatgatatgaaaatcgagctagatttgtggttcgagtaagttttccagttttaccgtatcctaaaaaacccgctaaccccgggcagtgactggttacgcattatcggtataaaatcagatgaaataatgcgctgaaactttctaacaattcgaagaaggttgtgtcgccgccgccgaagagaagccgtcgctactagtcgcccttcgggtacagaaatgctggaccgaaatgatgcttaactgcaaagcattacgatccatgggtgttgagaacgtagcgtgagtactactctagaagaacatatgcctccatctgttttaacacaaacgtgaagtgccatgtccaccacggaaagaacaatcctcctcacagccaaagcaagtgcacgccgccatcttcgcctcataattgccgatccagacttctacctcgccaaactgaaatatgcaatggattttgtctgggccaagtgcgcgttctccttcctattgcttctcaaattatcccgtctgatccctgagcgcgacgaggagcaccaagagctgctggaacaaggtaaccgactcgtcgatgagctgagtaaagctggagctagtggaactcagtccggtgctgggaatatttatcttcaaatcttgaaggtcagtattgagaagtacgggcgtgcattgatggaggcccagcaacccagctcagatgggcccacggatacgtcgccgttctgggagttgtttgatgcccaagcggatctccaatggtttgtccctgagcagtttgtctccgagtgggactttccggggctcaatttgttctatttccctactgcttggcaggattcccttggggacttttcgttggctatgtaattctataaattaaatcttaacctcacgactgctcaacgtcggatatagttacagaattctatcaatcttgaactatctactgttgctgtagtccttggtattatatatacatgggtttggaagacatattttcatcaaaacaaaagaaaagatctattaccgttccacagaaacagtatactcgacatccttccgaataatcatcctcgtactcacatcgctgccactacgctcactgctcctgtcctcctcggacctcccctccccagaatgcgacggccctgaagcctcacaaacgaccgtcctattctccgtcccatcgcccaagtgcggcctctccttgaacaaaccactcacctgacgggagggtcttccctttacattgcccatctcgtaatcccgcgaccgcccagaagcgtaggggtctgtatttacacgtctcctagacccagaaccgtatccatagccgccgctgctactaccaaggtttgagtcgccggccgtgccgtagtgggtactgagggcattcatgaaggggcgcagacagaataccgtgcatgctatcagggcgtagttgaggtggagctgggtgaagactgtgtggctgattgcggtgaaggtggggtttttcacgattgtgtattccttcagtttggcgagatggatggcggagaatactattaatctatcgtttgaattttgttagttccatatattagattgtgggaagtggaagagggacgtacggtagcctcgccgcgaaggacaccataatcacgattttatgtgtgatttgcatctgcagaccccagattagggcgatacagaaggcaaaaagtaatagttcggtcaaaatgtcgagcgcggtgattgcttgccagcgggggaacttgtcatcgttagtatatccgattctacgtctgtatattccgttcgcggtggtttttcaagtagacataccaggttatggcattgctcgccaggtataacccacggcttgtttccctcgcagttcactgcgataagcagtatcgatactataatccccactgtgctaagcacgaacgtcgcccagagaatactcttgtggtgcttgcggggcgtcaggcgcaagtagatggcaatgatgcagcatttggagaggtacagggttatgaggtagaggatgtcggcggcgaggagggactatgctgttagtgtatacaattgaatgggacattgggtaatgcgaacattttgtatgcgatcaacggccttctcggtgagtagcaatatgtccgtcccaaagccgatgctcgcggcgtggaagatgactattgactcgataattgcggatatctattcccgttagccccatttacggaatatgccagtttctttccatgcgtacggtcgctcccaaaaggatgatatcgtctgatccccacggtggactgaggaatgtccgcacatacacccggatcagcagacagaccagcgaaatcactaggcatatggcagcggtaatgataataataccggcatgatgcctgtcgtctattgtctcgaaaggcggtgactggccggggggcactttaatggccattgtggcacgtctttgggcttggaagtttcagcgaggatatcgtctgaaaagaaatacgaaaggacgataaccagcgaccatgatgctgactccgtcgatggtggccacacagctcaggcaacttaagtggagggacctagcaaggatagtaaccttggggctagtagctcgggtaggctcaaaccacttgagctcaagactcggcatcctaacatcattaaggaactagaattctagaaaaccctaatcatgataggggcccaggacggagtagtgtagaggtgatacaaaccattgttttcccgatcaagttagtcgatcttttcgagtctcgagctggaacccgatcgaacgtaacatagattaagtttgattgggttaatttaccagccagccgaagtgtgtagatagtgtcgtatgggggccgaaagccttccacttaagatatctcgaccgagcgggcgctccgccacgttagcaactaataaattaaaataattcgtcatctccaaccggacgggctcggagacttcgtacatactgggaacaaagttcggcgatatggggctgaatgggggccgaaaccttggaacccttccgcttagagtgcccccacctccacctgaatatggaataaattaaaaaacgcatcgagcttatgctcacgacctttttagaacactcacgacgaagtataacatacgttgtaacccaaaggatcaggccatagaaatgcgcgtcccaagcacccaattttccagaatattctctaatcactaaacctaggattccttcgattcctcgtcaattggactccgtacagccctctgaattcgctagtccatatattctagctagacactacgtaggcagttggtgactatctattaagctgatactgagggccgtgctgttaaaatatatcattggcttgagtctgtaaaaaaagtggaaaaaagtggaaaaaagtggaaaaaagtggaaaaaggtcctggttggatcgtgctactatcttgcacgcttgtttcatatccacgaggcacgaggctgccaagtccttccttttccttctctttatcaagtaccacaagaatacataactagtcccgaggtcggccgcgtttgcggctgctgtcgctaagaacggcctgatctagctagctccgtagtagtcttcagtagtctttttagtagtcttttagtacaacatagtctcttttcttgatttagttttctaatagatggcgggaaaagacggcataatttgtgaaactaacttttctacgaagtctgaataacctttgacccagtctctattaaccctggattaactttctctcctaaaatatatccagagtttgggatgtcgtgttgcccaaccactgatacggctgctctcaaatctacgccgttgcatcgaagaatccactttatcatccgagaatgtagctattgttgtatctctagttattaccctatctaatcacttttcctccctctaatgcaacagttattcaggttggtagcgcctacatctctcgcttcaccagcgccacgggcgggatatagtggtgccgtccccgcaacacataataaaccaccgcgacgataagaatcccaccgtacatcactgcgcaccagttcatggtttctggctccaccgtggaagtgagcgggaagaatgcgaacacgaaaaccgggcagaggaagcacaacgccccgatattaattgccatgccgaaccggccaagcgtccatttgtgcggtgggagaggctctcctctgatacgcttgaggagcacgcatgcaattgttatgatatatgaggacatcattgcgccaatggtcagggtcacaatggcgagtagtgcggttgtggagccgatattgatgagtgacaagaggactgtcactactagcgagaccatcacggaattcaaggggatattccaaccggggtttacctggcgctgttagtattttcaaagctgtagaaagagaataaaccatacatagccgaagaaatcggagaaaggaaggccgcgatcacgcgcgaaagaccacaactggcgcgatgccgttgcaacctctgtaattgtgctcgccgttagagtcagcactagaatagcggtcatggtgttcgttcccggcagactctctgtcgcgttatagaacacctgcatgaacggatatcctgttgggctggccaggatgtcgtcaatgtcccctagtgtgaagcagacagtcaccagcatcaggaagccggaggcggcgttgacgcagacagaggtgatcatcgcctttggcagggtttcagacgcatctttgatctcctccgctgtacaatattagcgaagttcgtcaattcgagagatagacttacacatgtgcactgcacaatcatatccaatcagcgcggtgattgtagtcgagaatccaacgagcgtggcagttcccgcgctgttccaatctccgccgttgttgaattcggtaaacacctccttcgcgctgcggcgagggccaaggacccacagcggaattatgatcgcgaacaggccgcacacatgcagaatcagaatcaatacctccacgaatggcagccgcttggccaggaatgtgttgaatatgatcgaaaacaaggtgatggcgataaccagcagggtgccgtgccaccgctggccttcataatccggatgattcagcactatcaggccttggatgatagttccagccaaatacgcgatcgctacaatggcgcattgccagcctgtagcacatagccagcctacataattagtttagttgagcggaagggatgtaggagaacttaccggtgatgtagctgaggaatttctggcagctaggaggggcaaattccgatacccaatggtattgtccgccggaggtgggcgccctggggggtcagaataattacgagacaagatctcaacgggtagactcacatggatgccatctcggccagactcaggaacaccagaaggaacccagtagcgacgatgaggtacccccagatcagaccggcagttcctccatcggtcagtccttgcgcaagcagcctatacagtcagtcattggtacaattagtaagtgtggatggcatacgtcaaaacaacctcccacgtggcgatcagcgtgcagccaaatcctacaatggagatgtatcggaagttacgctatagggtcagcgaagatgcatcaaccaggataataggaaacgtactcgcaagacttgctctttccctagagcgctcatatcggcctggtcagcctgggtgccgcgccatttgggggcgacatggcctctggacggggcttcgtcggccagagccatggtgactgttgaggtgtctttgtcccagggcatattgacatgtacacagcagagacaatgaagggtcaatacaaaggacaggggtatggtagatcacgtcggtactttgtatgaaagcaaggtgtcaagcattagaatattctccgcccctcgtggaattgaccgggtacatctgtctcatagtggagcag
